(19) United States
(12) Patent Application Publication
(10) Pub. No.: US 2023/0277590 A1
(43) Pub. Date: Sep. 7, 2023

(54) COMPOSITIONS AND METHODS FOR TREATING MESOTHELIN POSITIVE CANCERS

(71) Applicant: A2 Biotherapeutics, Inc., Agoura Hills, CA (US)

(72) Inventors: Carl Alexander Kamb, Westlake Village, CA (US); Dora Toledo Warshaviak, Agoura Hills, CA (US); Talar Tokatlian, Irvine, CA (US); Agnes Hamburger, Newbury Park, CA (US)

(21) Appl. No.: 18/062,873

(22) Filed: Dec. 7, 2022

Related U.S. Application Data
(63) Continuation of application No. 17/662,766, filed on May 10, 2022, now Pat. No. 11,602,543.
Application No. 17/662,766 is a continuation of application No. PCT/US21/46751, filed on Aug. 19, 2021.
(60) Provisional application No. 63/068,245, filed on Aug. 20, 2020.
(60) Provisional application No. 63/085,971, filed on Sep. 30, 2020.

(51) Int. Cl. A61K 35/17; A61P 35/00; C07K 14/725; C12N 15/113

(52) U.S. Cl. CPC A61K 35/17; A61P 35/00; C07K 14/7051; C12N 15/1138; A61K 38/00

(57) ABSTRACT

The disclosure provides immune cells comprising a first activator receptor specific to mesothelin and a second inhibitory receptor specific to a ligand that has been lost in a mesothelin-positive cancer cell, and methods of making and using same for the treatment of cancer.

### CROSS-REFERENCE TO RELATED APPLICATIONS

[0001] This application is claims benefit of priority to U.S. Provisional Application No. 63/085,971, filed on Sep. 30, 2020, and U.S. Provisional Application No. 63/068,245, filed on Aug. 20, 2020, each of which is incorporated herein by reference in its entirety.

### INCORPORATION BY REFERENCE OF SEQUENCE LISTING

[0002] The sequence listing paragraph application contains a Sequence Listing which has been submitted in ASCII format via EFS-WEB and is hereby incorporated by reference in its entirety. Said ASCII copy, created on Aug. 17, 2021 is named A2BI_019_03WO_SeqList_ST25.txt and is 1.08 MB in size.

### TECHNICAL FIELD

[0003] The disclosure relates to the fields of adoptive cell therapy and cancer therapeutics.

### BACKGROUND

[0004] Cell therapy is a powerful tool for the treatment of various diseases, particularly cancers. In conventional adoptive cell therapies, immune cells are engineered to express specific receptors, for example chimeric antigen receptors (CARs) or T cell receptors (TCRs), which direct the activity of the immune cells to cellular targets via interaction of the receptor with a ligand expressed by the target cell. Identification of suitable target molecules remains challenging, as many targets are expressed in normal tissues. This expression can lead to toxicity when the transplanted cells target normal tissues expressing target molecules. There is thus a need in the art for compositions and methods useful in the treatment of disease, particularly cancers, by adoptive cell therapy.

[0005] Mesothelin (MSLN) was proposed as a cancer target in 1992 (Chang et al. Cancer Res 52:181-86), yet there is still no viable therapy that utilizes MSLN. Not only is it expressed on most mesotheliomas but also large subsets of ovarian, cervical, uterine, gastric, pancreatic and lung adenocarcinomas. (Hassan et al. J Clin Oncol 34:4171-79) In normal adults, MSLN is present only in mesothelium, a tissue that itself may be nonessential. Several investigational therapeutics directed at MSLN have been tested; for example, immunotoxin-conjugates, antibody-drug conjugates, bispecific antibodies, CAR-Ts, and a hybrid TCR-scFv.

[0006] All active systemically administered therapeutics have been toxic. Accordingly, there exists a need in the art for compositions and methods related to treatment of MSLN(+) cancers.

### SUMMARY

[0007] Provided herein are compositions and methods related to treatment of MSLN(+) cancers. Advantageously, the compositions and methods disclosed herein may exploits loss of heterozygosity (LOH) to address MSLN(+) cancer. The compositions and methods disclosed herein may, in some cases, avoid systemic toxicity to normal tissues by pairing a MSLN-targeted activator receptor with a blocker receptor. Without being bound by theory, the difference in blocker antigen expression in tumor versus. normal tissues caused by LOH at the locus encoding the blocker antigen may confer high selectivity for tumor killing.

[0008] The disclosure provides immune cells comprising: (a) a first receptor, comprising an extracellular ligand binding domain specific to Mesothelin (MSLN); and (b) a second receptor, comprising an extracellular ligand binding domain specific to a non-target antigen lost in a MSLN+ cancer cell, wherein the first receptor is an activator receptor responsive to MSLN; and wherein the second receptor is an inhibitory receptor responsive to the non-target antigen.

[0009] In some embodiments of the immune cells of the disclosure, the non-target antigen is lost in the MSLN+ cancer cell through loss of heterozygosity.

[0010] In some embodiments of the immune cells of the disclosure, the extracellular ligand binding domain of the second receptor specifically binds an allelic variant of a major histocompatibility complex (MHC) protein. In some embodiments, the extracellular ligand binding domain of the second receptor specifically binds an allelic variant of an HLA-A, HLA-B, or HLA-C protein. In some embodiments, the extracellular ligand binding domain of the second receptor specifically binds to HLA-A*01, HLA-A*02, HLA-A*03, HLA-A*11, HLA-B*07, or HLA-C*07. In some embodiments, the extracellular ligand binding domain of the second receptor specifically binds to HLA-A*02. In some embodiments, the extracellular ligand binding domain of the second receptor comprises complementarity determining regions (CDRs) CDR-L1, CDR-L2, CDR-L3, CDR-H1, CDR-H2, CDR-H3 as disclosed Table 6; or CDR sequences having at most 1, 2, or 3 substitutions, deletions, or insertion relative to the CDRs of Table 6 or Table 7. In some embodiments, the extracellular ligand binding domain of the second receptor comprises complementarity determining regions (CDRs) CDR-L1, CDR-L2, CDR-L3, CDR-H1, CDR-H2, CDR-H3 of SEQ ID NOS: 42-47 or of SEQ ID NOS: 48-53; or CDR sequences having at most 1, 2, or 3 substitutions, deletions, or insertion relative to the CDRs of SEQ ID NOS: 42-47 or SEQ ID NOS: 48-53. In some embodiments, the extracellular ligand binding domain of the second receptor comprises a polypeptide sequence selected from the polypeptide sequence disclosed in Table 5; or a sequence having at least 85%, at least 90%, at least 95%, at least 97% or at least 99% identity thereto. In some embodiments, the extracellular ligand binding domain of the second receptor comprises any one of SEQ ID NOS: 30-41, or a sequence having at least 85%, at least 90%, at least 95%, at least 97% or at least 99% identity thereto.

[0011] In some embodiments of the immune cells of the disclosure, the first receptor is a chimeric antigen receptor (CAR). In some embodiments, the extracellular ligand binding domain of the first receptor comprises complementarity determining regions (CDRs) CDR-L1, CDR-L2, CDR-L3, CDR-H1, CDR-H2, CDR-H3 as disclosed Table 2; or CDR sequences having at most 1, 2, or 3 substitutions, deletions, or insertions relative to the CDRs of Table 2. In some embodiments, the extracellular ligand binding domain of the first receptor comprises a variable heavy (VH) portion comprising a sequence set forth in Table 3 and a variable light (VL) portion comprising a sequence set forth in Table 4; or a sequence having at least 80%, at least 90%, at least 95%, at least 97% or at least 99% identity thereto. In some embodiments, the extracellular ligand binding domain of the first receptor comprises a variable heavy (VH) portion comprising SEQ ID NO: 233 or a sequence having at least 85%, at least 90%, at least 95%, at least 97%, or at least 99% identity thereto, and a variable light (VL) portion comprising SEQ ID NO: 279 or a sequence having 85%, at least 90%, at least 95%, at least 97%, or at least 99% identity thereto. In some embodiments, the extracellular ligand binding domain of the first receptor comprises a sequence selected from the group consisting of SEQ ID NOS: 3-6, 80 and 154-215, or a sequence having at least 85%, at least 90%, at least 95%, at least 97%, or at least 99% identity thereto. In some embodiments, the extracellular ligand binding domain of the first receptor comprises an scFv sequence of SEQ ID NO: 171; or a sequence having at least 85%, at least 90%, at least 95%, at least 97% or at least 99% identity thereto.

[0012] In some embodiments of the immune cells of the disclosure, the first receptor comprises a hinge domain, a transmembrane domain and an intracellular domain. In some embodiments, the hinge domain comprises a CD8α hinge domain. In some embodiments, the CD8α hinge domain comprises a sequence of SEQ ID NO: 7, or a sequence having at least 85%, at least 90%, at least 95%, at least 97% or at least 99% identity thereto. In some embodiments, the transmembrane domain comprises a CD28 transmembrane domain. In some embodiments, the CD28 transmembrane domain comprises a sequence of SEQ ID NO: 11, or a sequence having at least 85%, at least 90%, at least 95%, at least 97% or at least 99% identity thereto. In some embodiments, the intracellular domain comprises a CD28 co-stimulatory domain, a 4-1BB co-stimulatory domain, and a CD3ζ activation domain. In some embodiments, the intracellular domain comprises a sequence of SEQ ID NO: 285, or a sequence having at least 85%, at least 90%, at least 95%, at least 97% or at least 99% identity thereto. In some embodiments, the first receptor comprises a sequence of SEQ ID NO: 303, or a sequence having at least 90%, at least 95%, at least 97% or at least 99% identity thereto.

[0013] In some embodiments of the immune cells of the disclosure, the second receptor comprises a LILRB1 intracellular domain or a functional variant thereof. In some embodiments, the LILRB1 intracellular domain comprises a sequence at least 90%, at least 95%, at least 97%, at least 99%, or is identical to SEQ ID NO: 70. In some embodiments, the second receptor comprises a LILRB1 transmembrane domain or a functional variant thereof. In some embodiments, the LILRB1 transmembrane domain or a functional variant thereof comprises a sequence at least 90%, at least 95%, at least 97%, at least 99% or is identical to SEQ ID NO: 74. In some embodiments, the second receptor comprises a LILRB1 hinge domain or functional variant thereof. In some embodiments, the LILRB1 hinge domain comprises a sequence at least 90%, at least 95%, at least 97%, at least 99% or is identical to SEQ ID NO: 73. In some embodiments, the second receptor comprises a LILRB1 intracellular domain, a LILRB1 transmembrane domain, a LILRB1 hinge domain, a functional variant of any of these, or combinations thereof. In some embodiments, the LILRB1 hinge domain, LILRB1 intracellular domain and LILRB1 transmembrane domain comprises SEQ ID NO: 71 or a sequence at least 90%, at least 95%, at least 97%, at least 99% or is identical to SEQ ID NO: 71. In some embodiments, the second receptor comprises a sequence of SEQ ID NO: 348, or a sequence having at least 90%, at least 95%, at least 97%, or at least 99% identity thereto.

[0014] In some embodiments of the immune cells of the disclosure, the MSLN+ cancer cell is a mesothelioma cancer cell, an ovarian cancer cell, a cervical cancer cell, a colorectal cancer cell, an esophageal cancer cell, a head and neck cancer cell, a kidney cancer cell, an uterine cancer cell, a gastric cancer cell, a pancreatic cancer cell, a lung cancer cell, a colorectal cancer cell or a cholangiocarcinoma cell, or any cancer cell expressing MSLN. In some embodiments, the MSLN+ cancer cell is a mesothelioma cancer cell, an ovarian cancer cell, a cervical cell, a uterine cancer cell, a gastric cancer cell, a pancreatic cancer cell or a lung adenocarcinoma cell.

[0015] In some embodiments, the MSLN+ cancer cell is an epithelial cancer cell. Epithelial cancers are cancers that originate in the epithelial cells. In some embodiments, the MSLN+ epithelial cancer is a carcinoma.

[0016] In some embodiments of the immune cells of the disclosure, the MSLN+ cancer cell is a MSLN+/HLA-A*02− cancer cell that does not express HLA-A*02. In some embodiments, the MSLN+/HLA-A*02− cancer cell is derived from a MSLN+/HLA-A*02+ cell by loss of heterozygosity at HLA-A leading to loss of HLA-A*02. In some embodiments, the first receptor and the second receptor together specifically activate the immune cell in the presence of the MSLN+/HLA-A*02− cancer cell having loss of heterozygosity. In some embodiments, the first receptor and the second receptor together do not specifically activate the immune cell in the presence of an MSLN+ cell that has not lost HLA-A*02 by loss of heterozygosity.

[0017] In some embodiments of the immune cells of the disclosure, the immune cell is a T cell. In some embodiments, the T cell is a CD8+CD4− T cell.

[0018] In some embodiments of the immune cells of the disclosure, expression and/or function of a MHC Class I gene has been reduced or eliminated. In some embodiments, the MHC Class I gene is beta-2-microglobulin (B2M). In some embodiments, the immune cells further comprise an interfering RNA, the interfering RNA comprising a sequence complementary to a sequence of a B2M mRNA. In some embodiments, the interfering RNA comprises a sequence selected from the group of sequences set forth in Table 13, or a sequence having at most 1, 2, 3, or 4 substitutions, insertions or deletions relative thereto. In some embodiments, the interfering RNA is capable of inducing RNAi-mediated degradation of the B2M mRNA. In some embodiments, the interfering RNA is a short hairpin RNA (shRNA). In some embodiments, the shRNA comprises: (a) a first sequence, having from 5′ end to 3′ end a sequence complementary to a sequence of the B2M mRNA; and (b) a second sequence, having from 5′ end to 3′ end a sequence complementary to the first sequence, wherein the first sequence and the second sequence form the shRNA. In some embodiments, the shRNA is encoded by a sequence comprising a sequence of GCACTCAAAGCTTGTTAAGATCGAAATCTTAACAAGCTTTGAGTGC (SEQ ID NO: 349) or GTTAACTTCCAATTTACATACCGAAGTATGTAAATTGGAAGTTAAC (SEQ ID NO: 350), or a sequence having at least 80%, at least 90%, or at least 95% identity thereto.

[0019] In some embodiments of the immune cells of the disclosure, expression and/or function of a MHC Class I gene has been reduced or eliminated. In some embodiments, the MHC Class I gene is beta-2-microglobulin (B2M). In some embodiments, the immune cells comprise one or more modifications to a sequence encoding B2M, wherein the one or more modifications reduce the expression and/or eliminate the function of B2M. In some embodiments, the one or more modifications comprise one or more inactivating mutations of the endogenous gene encoding B2M. In some embodiments, the one or more inactivating mutations comprise a deletion, an insertion, a substitution, or a frameshift mutation. In some embodiments, the one or more inactivating mutations are introduced with a nucleic acid guided endonuclease in a complex with at least one guide In some embodiments e nucleic acid (gNA) that specifically targets a sequence of the endogenous gene encoding B2M. In some embodiments, the gNA comprises a sequence selected from the group of sequences set forth in Table 12, or a sequence having at most 1, 2, 3, or 4 substitutions, insertions or deletions relative thereto.

[0020] In some embodiments of the immune cells of the disclosure, expression and/or function of a MHC Class I gene has been reduced or eliminated. In some embodiments, the MHC Class I gene is HLA-A*02. In some embodiments, the immune cells comprise a polynucleotide comprising an interfering RNA, comprising a sequence complementary to a sequence of an HLA-A*02 mRNA. In some embodiments, the interfering RNA is capable of inducing RNA interference (RNAi)-mediated degradation of the HLA-A*02 mRNA. In some embodiments, the interfering RNA is a short hairpin RNA (shRNA) comprising: (a) a first sequence, having from 5′ end to 3′ end a sequence complementary to a sequence of the HLA-A*02 mRNA; and (b) a second sequence, having from 5′ end to 3′ end a sequence complementary to the first sequence, wherein the first sequence and the second sequence form the shRNA. In some embodiments, the shRNA comprises a sequence set forth in 14. In some embodiments, the immune cells comprise one or more modifications to a sequence of an endogenous gene encoding HLA-A*02, wherein the one or modifications reduce the expression and/or eliminate the function of HLA-A*02. In some embodiments, the one or more modifications comprise one or more inactivating mutations of the endogenous gene encoding HLA-A*02. In some embodiments, the one or more inactivating mutations are introduced with a nucleic acid guided endonuclease in a complex with at least one guide nucleic acid (gNA) that specifically targets a sequence of the endogenous gene encoding HLA-A*02. In some embodiments, the gNA comprises a sequence set forth in Table 11.

[0021] In some embodiments of the immune cells of the disclosure, the first receptor comprises a sequence of SEQ ID NO: 164, and the second receptor comprises a sequence of SEQ ID NO: 52, or sequences having at least 90%, at least 95%, at least 97% or at least 99% identity thereto. In some embodiments, the immune cells comprise an shRNA encoded by a sequence comprising GCACTCAAAGCTTGTTAAGATCGAAATCTTAACAAGCTTTGAGTGC (SEQ ID NO: 349) or GTTAACTTCCAATTTACATACCGAAGTATGTAAATTGGAAGTTAAC (SEQ ID NO: 350) or a sequence having at least 80%, at least 90%, or at least 95% identity thereto. In some embodiments, the first receptor and second receptor are encoded by a single polynucleotide, and wherein the sequences encoding the first and second receptors are separated by a sequence encoding a self-cleaving polypeptide. In some embodiments, the self-cleaving polypeptide comprises a T2A self-cleaving polypeptide comprising a sequence of GSGEGRGSLLTCGDVEENPGP (SEQ ID NO: 351).

[0022] In some embodiments of the immune cells of the disclosure, the immune cells are autologous.

[0023] In some embodiments of the immune cells of the disclosure, the immune cells are allogeneic.

[0024] The disclosure provides a pharmaceutical composition, comprising a therapeutically effective amount of the immune cells of the disclosure. In some embodiments, the pharmaceutical composition further comprises a pharmaceutically acceptable carrier, diluent or excipient.

[0025] The disclosure provides a pharmaceutical composition, comprising a therapeutically effective amount of the immune cells of the disclosure for use as a medicament in the treatment of MSLN+ cancer.

[0026] The disclosure provides a polynucleotide or polynucleotide system, comprising one or more polynucleotides comprising polynucleotide sequences encoding: (a) a first receptor, comprising an extracellular ligand binding domain specific to Mesothelin (MSLN); and (b) a second receptor, comprising an extracellular ligand binding domain specific to a non-target antigen that has been lost in a MSLN+ cancer cell, wherein the first receptor is an activator receptor responsive to MSLN on the MSLN+ cancer cell; and wherein the second receptor is an inhibitory receptor responsive to the non-target antigen.

[0027] In some embodiments of the polynucleotide or polynucleotide system of the disclosure, the polynucleotide or polynucleotide system comprises one or more polynucleotides comprising polynucleotide sequences encoding the first receptor and the second receptor for use in generating the immune cells of the disclosure. In some embodiments, the polynucleotide or polynucleotide system comprises a sequence encoding an shRNA specific to B2M. In some embodiments, the sequences encoding the first receptor, the second receptor and the shRNA specific to B2M are encoded by the same polynucleotide. In some embodiments, (a) the sequence encoding the shRNA specific to B2M comprises GCACTCAAAGCTTGTTAAGATCGAAATCTTAACAAGCTTTGAGTGC (SEQ ID NO: 349) or GTTAACTTCCAATTTACATACCGAAGTATGTAAATTGGAAGTTAAC (SEQ ID NO: 350) or a sequence having at least 80%, at least 90%, or at least 95% identity thereto; (b) the sequence encoding the first receptor comprises a sequence encoding a polypeptide of SEQ ID NO: 303, or a sequence having at least 80%, at least 90%, or at least 95% identity thereto; and (c) the sequence encoding the second receptor comprises a sequence encoding a polypeptide of SEQ ID NO: 348, or a sequence having at least 80%, at least 90%, or at least 95% identity thereto.

[0028] The disclosure provides a vector, comprising the one or more polynucleotides of the disclosure.

[0029] The disclosure provides methods of killing a MSLN+ cancer cell having loss of heterozygosity at an MHC class I locus, comprising administering to the subject an effective amount of the immune cells or pharmaceutical composition of the disclosure.

[0030] The disclosure provides methods of treating MSLN+ cancer in a subject having a MSLN+ tumor having loss of heterozygosity at an MHC class I locus, comprising administering to the subject an effective amount of the immune cells or pharmaceutical composition of the disclosure.

[0031] The disclosure provides methods of treating a cancer in a subject comprising: (a) determining HLA-A genotype or expression of normal cells and a plurality of cancer cells of the subject; (b) optionally, determining the expression of MSLN in a plurality of cancer cells of the subject; and (c) administering to the subject an effective amount of the immune cells or pharmaceutical composition of the disclosure if the normal cells express HLA-A*02 and the plurality of cancer cells do not express HLA-A*02, and the plurality of cancer cells are MSLN-positive.

[0032] In some embodiments of the methods of the disclosure, the subject is a heterozygous HLA-A*02 patient with a malignancy that expresses MSLN (MSLN+) and has lost HLA-A*02 expression. In some embodiments, the subject is a heterozygous HLA-A*02 patient with recurrent unresectable or metastatic solid tumors that express MSLN and have lost HLA-A*02 expression. In some embodiments, the cancer comprises mesothelioma cancer, ovarian cancer, cervical cancer, colorectal cancer, esophageal cancer, head and neck cancer, kidney cancer, uterine cancer, gastric cancer, pancreatic cancer, lung cancer, colorectal cancer, or cholangiocarcinoma. In some embodiments, the cancer comprises mesothelioma, ovarian cancer, cervical cancer, uterine cancer, gastric cancer, pancreatic cancer or lung adenocarcinoma. In some embodiments, the cancer has relapsed in a subject. In some embodiments, the cancer is refractory to one or more prior administered anticancer therapies. In some embodiments, the cancer is metastatic.

[0033] In some embodiments of the methods of the disclosure, the cancer cells comprise MSLN+/HLA-A*02− cancer cells that do not express HLA-A*02. In some embodiments, the MSLN+/HLA-A*02− cancer cells are derived from a MLSN+/HLA-A*02+ cell by loss of heterozygosity at HLA-A leading to loss of HLA-A*02. In some embodiments, the first receptor and the second receptor together specifically activate the immune cell in the presence of the MSLN+/HLA-A*02− cancer cells. In some embodiments, the first receptor and the second receptor together do not specifically activate the immune cell in the presence of a MSLN+ cell that has not lost HLA-A*02.

[0034] In some embodiments of the methods of the disclosure, administration of the immune cells or pharmaceutical composition reduces the size of a tumor in the subject. In some embodiments, the tumor is reduced by about 5%, about 10%, about 15%, about 20%, about 25%, about 30%, about 35%, about 40%, about 45%, about 50%, about 55%, about 60%, about 65%, about 70%, about 75%, about 80%, about 85%, about 90%, about 95%, or about 100%. In some embodiments, the tumor is eliminated.

[0035] In some embodiments of the methods of the disclosure, administration of the immune cells or pharmaceutical composition arrests the growth of a tumor in the subject.

[0036] In some embodiments of the methods of the disclosure, administration of the immune cells or pharmaceutical composition reduces the number of tumors in the subject.

[0037] In some embodiments of the methods of the disclosure, administration of the immune cells or pharmaceutical composition results in selective killing of a cancer cell but not a normal cell in the subject. In some embodiments, at least about 60% of the cells killed are cancer cells, about 65% of the cells killed are cancer cells, about 70% of the cells killed are cancer cells, about 75% of the cells killed are cancer cells, about 80% of the cells killed are cancer cells, about 85% of the cells killed are cancer cells, about 90% of the cells killed are cancer cells, about 95% of the cells killed are cancer cells, or about 100% of the cells killed are cancer cells. In some embodiments, administration of the immune cell or pharmaceutical composition results in the killing of at least about 40%, about 50%, about 60%, about 70%, about 80%, about 90% or all of the cancer cells of the subject.

[0038] In some embodiments of the methods of the disclosure, administration of the immune cell or the pharmaceutical composition results in fewer side effects for the subject than administration of an otherwise equivalent immune cell comprising the first activator receptor but no second inhibitory receptor.

[0039] The disclosure provides methods making a plurality of immune cells, comprising: (a) providing a plurality of immune cells, and (b) transforming the plurality of immune cells with the polynucleotide, polynucleotide system or vector of the disclosure.

[0040] The disclosure provides kits comprising the immune cells or pharmaceutical composition of the disclosure. In some embodiments, the kits further comprise instructions for use.

### BRIEF DESCRIPTION OF THE DRAWINGS

[0041] FIG. 1 is a table showing expression of blocker candidate genes from the TCGA database. (*) indicates genes previously identified as being expressed in the mesothelium.

[0042] FIG. 2 is a plot showing Mesothelin (MSLN) expression in normal tissues.

[0043] FIG. 3 is a plot showing the expression of MSLN across TCGA cancers (with tumor and normal samples.) Abbreviations: BLCA (Bladder cancer), BRCA (Breast Cancer), CESC (Cervical squamous cell carcinoma and endocervical adenocarcinoma), CHOL Cholangiocarcinoma), COAD (Colon adenocarcinoma), ESCA (Esophageal carcinoma), GBM (Glioblastoma multiforme), HNSC (Head and Neck squamous cell carcinoma), KICH (Kidney Chromophobe), KIRP (Kidney renal papillary cell carcinoma), LIHC (Liver hepatocellular carcinoma), LUAD (Lung adenocarcinoma), LUSC (Lung squamous cell carcinoma), PAAD (Pancreatic adenocarcinoma), PRAD (Prostate adenocarcinoma), PCPG (Pheochromocytoma and Paraganglioma), READ (Rectum adenocarcinoma), SARC (Sarcoma), SKCM (Skin Cutaneous Melanoma), THCA (Thyroid carcinoma), THYM (Thymoma), STAD (Stomach adenocarcinoma), UCEC (Uterine Corpus Endometrial Carcinoma).

[0044] FIG. 4 is a plot showing MSLN expression in CCLE cell lines.

[0045] FIG. 5 is a plot showing LRRN4 expression in normal tissues.

[0046] FIG. 6 is a plot showing the expression of LRRN4 across TCGA cancers (with tumor and normal samples).

[0047] FIG. 7 is a plot showing the expression of LRRN4 across TCGA tumors.

[0048] FIG. 8 is a plot showing expression of LRRN4 in CCLE cell lines.

[0049] FIG. 9 is a plot showing the distribution of 10 leucine rich repeat (LRR) and Fibronectin Type III domains relative to the transmembrane domain of LRRN4. Most of these domains are likely located on the cell surface.

[0050] FIG. 10A shows that a pMHC HLA-A*02 scFv LIR-1 based inhibitory receptor can inhibit activation of Jurkat cells in cis in a cell-free bead based assay.

[0051] FIG. 10B that a pMHC HLA-A*02 scFv LIR-1 based inhibitory receptor can inhibit activation of Jurkat cells by a MSLN scFv CAR using the leukemia cell line K562 as target cells.

[0052] FIG. 11 is a diagram (left) and a chart (right) showing that a pMHC HLA-A*02 scFv LIR-1 based inhibitory receptor can inhibit activation of Jurkat cells, as measured by fold induction of IFNγ, by a MSLN scFv CAR using a pMHC HLA-A*02 scFv LIR-1 based inhibitory receptor and HLA-A*02+ HeLa and SiHa cells as target cells.

[0053] FIG. 12 shows that a pMHC HLA-A*02 scFv LIR-1 based inhibitory receptor inhibits killing by MSLN CAR activators using HLA-A*02+ SiHa cells but not HLA-A*02− SiHa cells.

[0054] FIG. 13 is a diagram of the bioinformatics pipeline used to identify potential inhibitory receptor targets that are lost in cancer cells due to loss of heterozygosity.

[0055] FIG. 14 is a of the bioinformatics pipeline used to identify potential inhibitory receptor targets that are not expressed in cancer cells.

[0056] FIG. 15A is a pair of plots showing that the HLA-A*02 blocker inhibits MSLN CAR activators directed at MSLN, a high-density antigen. Jurkat cells transfected with MSLN LBD1-CAR or MSLN LBD1-CAR & A2-LIR-1 co-cultured with K562 cells expressing either MSLN or MSLN & HLA-A*02 shows blocking of activation by a high-density antigen with A2-LIR-1 blocker only in the presence of HLA-A*02.

[0057] FIG. 15B is a pair of plots showing that the HLA-A*02 blocker inhibits MSLN CAR activators directed at MSLN, a high-density antigen. Killing of endogenous MSLN+ HeLa cells by MSLN LBD1-CAR T cells is blocked in the presence of HLA-A*02 with the A2-LIR-1 blocker.

[0058] FIG. 15C is a pair of plots showing that the HLA-A*02 blocker inhibits MSLN CAR activators directed at MSLN, a high-density antigen. Killing of endogenous MSLN+ HeLa cells by MSLN LBD2-CAR T cells is shown. The effect of A2-LIR-1 blocker on T cell killing is in part controlled by the activator LBD, suggesting further optimization of the blocker module or pairs of activator/blockers may be required.

[0059] FIG. 16 is a series of plots showing that HLA-A*02 LIR1 inhibitory receptors (PA2.1, mouse and humanized) effectively block killing by T cells expressing MSLN Generation 3 CAR in the presence of HeLa cells that express MSLN and HLA-A*02. Top row: MSLN+ HLA-A*02+ HeLa target cells; bottom row: MSLN+ HLA-A*02− HeLa cells (control). The murine SS1 generation 3 CAR (upper right, boxed) provides a better window than the humanized M5 and humanized SS1 CARs.

[0060] FIG. 17 is a series of plots showing that HLA-A*02 LIR1 inhibitory receptors (PA2.1, mouse and humanized) effectively block killing by T cells expressing MSLN Generation 3 CAR in the presence of MSLN+ HLA-A*02+ Capan-2 cells.

[0061] FIG. 18 is a pair of plots that shows that killing of MSLN+ HLA-A*02+ HeLa cells (left) or HCT116 wild type (WT) cells that are natively MSLN+ HLA-A*02+ by T cells expressing a 2nd generation CAR with a murine SS1 scFv is effectively blocked by an HLA-A*02 scFv LIR1 inhibitory receptor.

[0062] FIG. 19 is a series of fluorescence activated cell sorting (FACS) plots showing the expression of murine SS1 second generation CARs by T cells, with and without co-transduction of an HLA-A*02 scFv LIR-1 blocker.

[0063] FIG. 20A is a plot showing the effect of LIR-1 hinge on the ability of an HLA-A*02 inhibitory receptor to block activation of Jurkat cells by a KRAS TCR. H: hinge, T: transmembrane domain, ICD: intracellular domain, s: short. LIR-1 constructs are described in more detail in FIG. 20B. Humanized PA2.1 and humanized BB7.2 with shorter LIR-1 hinge block similarly to original, longer hinge

[0064] FIG. 20B is a plot and a table showing EC50 shift (+/− HLA-A*02 target cells) for Jurkat cells expressing a KRAS TCR activator and the HLA-A*02 scFv LIR-1 inhibitory receptors shown in the table at bottom (SEQ ID NOs: 352-356).

[0065] FIG. 21A is a plot showing the effect of LIR-1 hinge on the ability of an HLA-A*02 inhibitory receptor to block activation of Jurkat cells by a KRAS TCR. H: hinge, TM: transmembrane domain, ICD: intracellular domain, s: short; tr: truncated. LIR-1 constructs are described in more detail in FIG. 21B. Mouse PA2.1 with slightly longer hinges function similarly to original LIR-1 hinge in T2-Jurkat assay.

[0066] FIG. 21B is a plot and a pair of tables showing EC50 shift (+/− HLA-A*02 target cells) for Jurkat cells expressing a KRAS TCR activator and the HLA-A*02 scFv LIR-1 inhibitory receptors shown in the table at bottom (SEQ ID NOs: 357-361), with lengths shown in the table at left.

[0067] FIG. 22A and FIG. 22B show the Tmod approach to achieve selective cytotoxicity with two targets (Tmod refers to immune cells expressing the combination of activator and inhibitory receptor). FIG. 22A shows the lung (and other vital organs) are surrounded by the MSLN(+) mesothelial lining, creating high risk of on-target, off-tumor toxicity for MSLN-targeted medicines. By selecting patients heterozygous for HLA-A*02 whose tumors have lost this allele via LOH, there is an opportunity to target MSLN-activated CAR-T cells to kill tumor cells specifically and spare normal mesothelium. FIG. 22B shows the molecular composition of MSLN-targeted Tmod constructs (Tmod refers to the paired activator and inhibitory receptors). The two receptors are co-expressed in a single construct and the encoded fusion protein is cleaved in the cell to generate the activator and blocker.

[0068] FIG. 23A, FIG. 23B, FIG. 23C, and FIG. 23D show the isolation and characterization of selective MSLN binders. On-target probe was labeled soluble MSLN (Acro Bio); off-target probe used for counterselection was a mixture of soluble CEA and EGFR proteins. FIG. 23A shows enrichment of IgG library. FIG. 23B shows enrichment of scFv library. FIG. 23C shows surface expression of MSLN CARs (Gen3) in Jurkat cells. Cells were transfected with CAR constructs and stained with Protein L or monomeric soluble MSLN (see Methods). Benchmark and CAR1-6 expression histograms are labeled. PE, phycoerythrin; NA, neutravidin; SA, streptavidin. “On-target NGS” corresponds to the cell populations that are collected and subjected to DNA sequencing to determine enrichment of individual idiotypes.

[0069] FIG. 23D shows the characterization of MSLN binders in solid-state Jurkat cell assays with MSLN protein attached to the surface (see Hamburger et al., 2020). 62 CAR constructs (Gen3) bearing different scFvs were transiently transfected in Jurkat cells to express CARs and a functional response to surface-bound recombinant human sMSLN (Acro Bio) was assessed after 6 hours. Most resulted in some degree of response.

[0070] FIG. 24A shows the sensitivity of MSLN CARs vs. benchmark CARs M5, SS1 and m912. All constructs were Gen3 except SS1 (Gen2). Jurkat cell dose-response (RLU) was measured to assess the sensitivity in a 6 hour co-culture assay: (1) Titrated MSLN-encoding mRNA was used to transfect HEK293 cells; (2) QIFIKIT (quantitative analysis kit, Agilent) was used to convert flow-cytometry based surface expression to MSLN molecules/cell; and, (3) The molecule/cell sensitivities (EC50) of 6 novel and three benchmark CARs were calculated from fitting the dose-response curves. For those CARs with sensitivities below the limit of detection of the assay, EC50 was reported as <3000 MSLN molecules/cell. Maximum signal (Emax) for each construct was also noted. Experiments were repeated 1-4 times.

[0071] FIG. 24B shows CAR3 selectivity. An example of MSLN CAR3 selectivity benchmarked against the M5 CAR. Activation of CARs in a Jurkat cell functional assay by MSLN(+) or MSLN(−) cell lines was measured. For MSLN(+) cell lines, variant MSLN(−) versions were generated by MSLN knockout for comparison For more detailed off-target characterization, see FIG. 32B.

[0072] FIG. 25A shows expression of MSLN in human cell lines assessed by staining with MSLN mAb and flow cytometry. K562 displayed some cross-reactivity to the anti-MSLN antibody, although no functional reactivity to CAR3 or M5 benchmark CAR was observed.

[0073] FIG. 25B shows plotted levels of MSLN and A*02 mRNA (CCLE) and protein (QIFIKIT) show correlation. Conversions between protein and mRNA levels were calculated using the standard curves (see Methods for Example 8, infra).

[0074] FIG. 26A shows a summary of cell lines used in this study. Quantification of surface densities of MSLN and A*02 in various cancer cell lines, and corresponding reported mRNA levels in normal lung tissue (GTEx). Surface MSLN and A*02 of engineered and wildtype tumor cell lines was quantified using a QIFIKIT (quantitative analysis kit, Agilent). Where cell line HLA-A haplotypes are heterozygous for A*02, the TPM values were divided by 2. Note that in certain cases the HLA-A allele copy number is not known. The TPM value of MS751+ transduced A*02 (438 TPM) was estimated from measurement of its surface A*02 protein level using the standard curve. Cell lines transduced with HLA-A*02 better mimic the A*02:MSLN ratio of normal lung tissue than cell lines expressing endogenous levels of the proteins (bold black boxes). TPM, transcripts per million; na, not applicable; A*02: HLA-A*02.

[0075] FIG. 26B shows quantification of MSLN molecules/cell using QIFIKIT. Anti-human MSLN mouse antibody clone 618923 (R&D Systems) was used to stain ˜100,000 cells. After washing the cells, anti-mouse IgG F(ab′)2 secondary antibody (Invitrogen A21237) was used to stain both the cells and QIFI beads. The number of MSLN molecules on the surface was quantified using the QIFI antigen standard curve.

[0076] FIG. 27A shows the characterization of MSLN CAR Tmod constructs in Jurkat cell functional assays. Six HuTARG-derived MSLN activators (CAR1-6) and benchmark CARs M5 and SS1 activators were paired with A*02 blocker (closed circles) or empty vector control (open circles). Jurkat NFAT luciferase cells expressing the CAR+/− blocker were co-cultured with wild-type, endogenous MSLN(+) HeLa cells transfected with a titration of A*02:01 mRNA. The functional response (RLU) was assessed after a 6 hour co-culture. Titrated antigen molecules on the surface were quantified using the QIFIKIT. IC50 (molecules/cell) values are indicated in the figure. CAR1-6 are Gen3; CAR M5 and SS1 are Gen2.

[0077] FIG. 27B shows a 2-dimensional titration of MSLN and A*02 mRNA in MSLN(−) HeLa target cells to establish EC50 for the MSLN CAR3 Tmod construct in Jurkat cells. MSLN(−) HeLa target cells were transfected with serially diluted MSLN mRNA and constant A*02 mRNA and Jurkat cells were transiently transfected to express MSLN CAR3 and A*02 blocker. The functional response (RLU) was assessed after a 6 hour co-culture.

[0078] FIG. 27C shows a transfection of MSLN(−) HeLa target cells with serially diluted A*02 mRNA and constant MSLN mRNA to establish IC50 for the MSLN CAR3 Tmod construct in Jurkat cells.

[0079] FIG. 28A shows plotted levels of MSLN and A*02 mRNA and protein. EC50 and IC50 of construct in relation to MSLN and HLA-A expression levels in normal (GTEx database) and tumor tissues and cell lines (TCGA, CCLE databases). Conversions between protein and mRNA levels were calculated using the standard curves shown in FIG. 25B; Methods). HeLa and MS751 A*02 transgenic cell line variants shown on the graph better mimic activator and blocker target ratios in normal tissues.

[0080] FIG. 28B shows MSLN CARs and CAR3 Tmod cytotoxicity in primary T cells. Primary T cells transduced with CARs or Tmod were co-cultured at an effector:target (E:T)=1:1 for 48 hours with either tumor or normal target cells as shown. A*02:MSLN (B:A) target antigen ratios ranged from 2-27:1. M5 was a Gen2 CAR; all others Gen3. Tumor=MSLN(+)A*02(−) target cells; Normal=MSLN(+)A*02(+) target cells.

[0081] FIG. 29A shows a comparison of lead CAR3 receptor paired with A*02 blocker to benchmark CARs in cytotoxicity assays. SS1 CAR is a Gen2 construct; others are Gen3. Primary T cells transduced with various CARs+/−A*02 blocker using 2 separate lentiviral vectors were cultured with endogenous MSLN(+) A*02(−) tumor or MSLN(+)A*02(+) normal HeLa cells to assess cytotoxicity. Transduced primary T cells were normalized to a constant activator or activator-blocker double-positive population percentage [15% A(+) or A(+)B(+)] cells by dilution with untransduced T cells for a final effective effector:target (E:T) ratios of 0.6:1 or 0.3:1. Both E:T ratios resulted in selective killing in the presence of A*02 antigen when T cells also expressed A*02 blocker.

[0082] FIG. 29B shows secreted IFN-g after 48-hours of co-culture with tumor or normal target cells.

[0083] FIG. 30A shows MSLN CAR3 Tmod cells selectively kill RFP(+) tumor cells and spare GFP(+) normal cells in mixed tumor and normal cell co-cultures. Due to the adherent nature of the HeLa cell line, killed targets tend to remain as clusters on the surface. White arrows point to some examples of killed RFP(+) tumor cells. Example of E:T 0.6:1 and normal:tumor=1:1.

[0084] FIG. 30B shows cytotoxicity in mixed normal and tumor co-cultures with E:T=1:1 and normal:tumor=9:1 (see FIG. 31B for other ratios). Primary T cells transduced with CAR3 or CAR3 Tmod construct were co-cultured with HeLa target cells for 48 hours and imaged using GFP and RFP expressed in MSLN(+)A*02(+) normal and MSLN(+)A*02(−) tumor cell lines, respectively.

[0085] FIG. 31A shows MSLN CAR3 Tmod cells selectively kill RFP(+) tumor cells in mixed tumor and normal cell co-cultures. Primary T cells transduced with CAR3 Tmod construct were co-cultured with HeLa cells for 48 hours and imaged using GFP and RFP expressed in MSLN(+)A*02(+) normal and MSLN(+)A*02(−) tumor cell lines, respectively.

[0086] FIG. 31B shows cytotoxicity of CAR3 and CAR3 Tmod in mixed normal and tumor co-cultures with normal:tumor ranging from 9:1 to 1:9; E:T=0.6:1.

[0087] FIG. 32A shows the MSLN CAR3 Tmod construct mediates selective, persistent and reversible cytotoxicity. CAR3 or CAR3 Tmod transduced primary T cells were co-cultured with E:T=1.2:1 for 48 hours with either tumor or normal target cells. T cells were then collected, depleted of dead or nonadherent target cells, and re-seeded onto fresh tumor or normal target cells for an additional 48 hours. RACA, repeat-antigen challenge assay. R1, round 1; R2, round 2.

[0088] FIG. 32B shows MSLN CAR3 Tmod construct selectivity in a Jurkat cell functional assay on a subset of MSLN(+) and MSLN(−) control target cells showed no off-target activity (see Methods for Example 8, infra). Bar height corresponds to the average from technical replicates.

[0089] FIG. 33A shows a schematic of RACA (repeat-antigen challenge assay) and reversibility assay. CAR3 or CAR3 Tmod transduced primary T cells were co-cultured with E:T=1.2:1 for 48 hours with either tumor or normal targets. T cells were then collected, depleted of any dead or lifted target cells, and re-seeded onto fresh tumor or normal targets for an additional 48 hours.

[0090] FIG. 33B shows soluble circulating MSLN (sMSLN) does not affect CAR-T activity. Acute cytotoxicity of tumor or normal target cells by M5 benchmark CAR or CAR3 were not affected by the presence of 500 ng/mL sMSLN (Acro Bio).

[0091] FIG. 33C shows the staining of transiently-transfected CAR(+) Jurkat cells with labeled sMSLN monomer or tetramer analyzed by flow cytometry shows that the sMSLN is structurally intact and able to bind the receptors.

[0092] FIG. 34A, FIG. 34B, and FIG. 34C show the Tmod construct mediates selective killing of tumor cells in a xenograft model. FIG. 34A shows a schematic diagram of the dual-flank tumor and normal MS751 xenograft model. FIG. 34B shows bioluminescence values are to the right of the color scale in flux units of photons/sec/cm2/sr. Day 0=pre T cell injection; days 8 and 15=post T cell injection. FIG. 34C shows graft sizes assessed by caliper measurement (see Results for Example 8, infra).

[0093] FIG. 35A, FIG. 35B, and FIG. 35C show MSLN CAR Tmod selectively kill tumors in xenograft model FIG. 35A shows primary T cells transduced with MSLN CARs or CAR3 Tmod were co-cultured with either HLA-A KO tumor or A*02-transgenic normal MS751 target cells in vitro at an E:T=1.4:1 for 48 hours. M5 was a Gen2 CAR; all others Gen3. Tumor=MSLN(+)A*02(−) target cells; Normal=MSLN(+)A*02(+) target cells. FIG. 35B shows individual mouse xenograft growth curves for data shown in FIG. 34C. FIG. 35C shows BLI quantification of normal and tumor cells post T cell injection.

[0094] FIG. 36 shows cis binding of A*02 blocker in A*02(+) or (−) T cells abrogates function. Binding of the blocker in A*02(+) Jurkat cells and primary T cells by A*02 tetramer was significantly reduced due to cis-binding of autologous A*02. Reduced binding (due to reduced availability of the blocker) correlated with reduced blocker activity. Cytotoxicity assay shown at an E:T=0.5:1.

[0095] FIG. 37A, FIG. 37B, and FIG. 37C show the MSLN Tmod system can be extended to autologous T cells. FIG. 37A shows cis-binding of autologous A*02 in an A*02(+) donor eliminates binding to A*02 tetramer B2M knockout (KO) by CRISPR restores blocker availability as demonstrated by binding to A*02 tetramer, similar to observed levels in an A*02(−) donor. FIG. 37B shows a cytotoxicity assay showing activator-only and MSLN SS1 CAR Tmod primary T cells cultured with tumor (solid) or normal (open) target cells. MSLN SS1 CAR Tmod construct kills MSLN(+) A*02(−) tumor HeLa target cells but no longer blocks in the presence of autologous A*02 as a result of cis-binding. For the A*02(+) donor, blocking is only achieved through B2M CRISPR KO. E:T=1.2:1. FIG. 37C shows representative images at 48 h.

[0096] FIG. 38A shows enrichment of anti-HLA-A*11 binders through multiple rounds of cell sorting from scFv library. On-target probe was labeled HLA-A*11 tetramer; off-target proteins were a mixture of unrelated MHC tetramers.

[0097] FIG. 38B shows Jurkat cell activation in an mRNA titration assay: HeLa target cells were transfected with serially diluted HLA-A*11 mRNA and Jurkat cells were transiently transfected to express HLA-A*11 CAR4. The functional response (RLU) was assessed after a 6 hour co-culture. PE, phycoerythrin.

[0098] FIG. 39A shows Jurkat cells expressing MSLN CAR3 and A*03, A*11 or B*07 blocker constructs were blocked in the presence of increasing blocker antigen on endogenous MSLN(+) HeLa target cells.

[0099] FIG. 39B and FIG. 39C show primary T cell cytotoxicity assay of MSLN CAR3+A*11 blocker. Primary T cells transduced with CAR3 and A*11:01-directed blocker efficiently blocks HeLa target cells with A*11:01 and kills wildtype HeLa cells as effectively as CAR-only cells. Transduced primary T cells were co-cultured with HeLa cells with or without HLA-A*11:01 at an E:T=0.8:1. Note that both tumor and normal target cells used here expressed GFP. FIG. 39C shows representative co-culture images at 48 hours for FIG. 39B.

### DETAILED DESCRIPTION

[0100] Provided herein are compositions and methods for treating cancers using immune cells comprising a two receptor system responsive to differences in gene expression of a ligand between cancer and normal (i.e. healthy or wild type) cells. These differences in expression can be due to loss of heterozygosity in the cancer cells. Alternatively, the differences in expression can be because the gene expression is not expressed in cancer cells, or is expressed in cancer cells at a lower level than normal cells. The two-receptor system is expressed in immune cells, for example immune cells used in adoptive cell therapy, and targets activity of these immune cells to cancer cells exhibiting loss of heterozygosity or expression differences. In this two receptor system, the first receptor (an activator receptor, sometimes referred to herein as an A module) activates, or promotes activation of the immune cells, while the second receptor (an inhibitory receptor, sometimes referred to herein as a blocker, inhibitor receptor, or B module) acts to inhibit activation of the immune cells by the first receptor. Each receptor contains a ligand-binding domain (LBD) that binds a specific ligand. Signals from the two receptors upon ligand binding are integrated by the immune cell. Differential expression of ligands for the first and second receptors in cancer and normal cells, for example through loss of heterozygosity of the locus encoding the inhibitory ligand in cancer cells, or differences in transcription levels, mediates activation of immune cells by target cancer cells that express the first activator ligand but not the second inhibitory ligand.

[0101] Loss of heterozygosity (LOH) from large-scale chromosomal deletions is a source of genetic difference in tumors. LOH is a common event in tumorigenesis which affects nearly every locus in the genome, with approximately 20% of genes displaying LOH in an average tumor. LOH provides the means to discriminate tumor from normal tissue in a definitive way because tumors can be found in which all malignant cells lack certain germline alleles. One locus that undergoes LOH is the human leukocyte antigen (HLA) locus, which encodes polymorphic, abundant, ubiquitous surface antigens. The two-receptor system described herein employs one receptor to activate T cells exposed to tumor-antigen-positive tumor cells (sometimes referred to as an “activator module”), and a second receptor to prevent activation of the immune cells in the presence of a surface blocker antigen such as HLA-A*02 protein. The dual-receptor system described herein (sometimes referred to herein as “Tmod”) possesses other advantageous properties as a cell therapy, including but not limited to reversible activation/blockade of immune cells, and selectivity in mixtures of tumor and “normal” cells.

[0102] In particular embodiments of the compositions and methods provided herein, immune cells comprising the two receptor system described herein are used to treat Mesothelin (MSLN) positive cancers. This includes mesothelioma cancer, ovarian cancer, cervical cancer, colorectal cancer, esophageal cancer, head and neck cancer, kidney cancer, uterine cancer, gastric cancer, pancreatic cancer, lung cancer, colorectal cancer, or cholangiocarcinoma. In some embodiments, the cancer has relapsed in a subject. In some embodiments, the cancer is refractory to one or more prior administered anticancer therapies. In some embodiments, the cancer is metastatic. In the case of MSLN-positive cancers, the target antigen of the activator receptor is MSLN, or a peptide antigen thereof, in a complex with a major histocompatibility complex class I (MHC-I). MSLN is expressed in normal adipose, fallopian tube, lung and salivary gland tissues, among others (FIG. 2). Because of its expression in certain tumors, MSLN is an attractive tumor-specific antigen that could mediate selective killing of MSLN+ tumors if these cancer cells could be specifically targeted with an appropriate therapeutic. However, normal MSLN expression in non-cancer (non-target) cells has prevented the effective use of MSLN for targeted therapies such as adoptive cell therapies. By pairing an MSLN activator receptor with an inhibitory receptor, the methods provided herein increase the specificity of adoptive cell therapies and decrease harmful effects associated with these therapies, such as dose-limited toxicity.

[0103] In some embodiments, the ligand for the activator is a MSLN peptide complexed with MHC class I. In the methods described herein, this MSLN targeted activator receptor is paired with an inhibitory receptor, which increases the safety window of the activator by blocking its cytolytic effect on normal MSLN-positive tissues. However, the activator receptor still directs the targeted killing of tumor cells by immune cells comprising the two-receptor system, as the tumor cells do not express the ligand for the inhibitor, or blocker, receptor. The target for the second, inhibitory receptor is expressed by MSLN positive tissues such as lung, mesothelium and adipose tissues, but not in cancer cells, and the inhibitory receptor recognizes this “non-target antigen” as an inhibitory stimulus. An exemplary target for the second inhibitory receptor is expressed by lung tissue, and is lost from MSLN positive cancer cells due to loss of heterozygosity (LOH) or other mechanisms, leaving a single allelic form in cancer cells that can be distinguished from other alleles via an allele-specific ligand binding domain on the inhibitory receptor. Exemplary targets of the inhibitory receptor include, but are not limited to, Major Histocompatibility Complex (MHC) proteins such as human leukocyte antigen A (HLA-A). HLA-B, HLA-C, and other HLAs. HLAs are encoding by variant genes, such as HLA-A*01., HLA-A*02, HLA-A*03, HLA-C*07, and others, which can be lost from MSLN positive cancer cells through loss of heterozygosity. Alternatively, further exemplary targets of the inhibitory receptor include, but are not limited to, intercellular adhesion molecule 1 (ICAM1), catechol-O-methyltransferase (COMT) and C—X—C motif chemokine ligand 16 (CXCL16). Each of these has a common nonsynonymous variant form, with the amino-acid alteration in its extracellular domain accessible to antibodies, which can be used as a inhibitory receptor, or blocker receptor target for a cellular integrator designed to safely treat patients with MSLN positive cancers with engineered T cells activated by an activator receptor such as a MSLN or MSLN pMHC responsive activator receptor.

[0104] The compositions and methods of the disclosure can reduce or eliminate dose-limiting toxicity (DLT) caused by expression of MSLN on normal tissue. The disclosure provides methods of targeting MSLN in cancer cells to treat MSLN positive cancers using adoptive cell therapies by adding a second inhibitory receptor that blocks activation of the adoptive immune cells in the presence of a second ligand (a ligand other than MSLN, termed the non-target antigen or alternatively, blocker antigen). Using the compositions and methods described herein, tumor cells that express MSLN are attacked by the adoptive cells, such as immune cells, expressing the two receptors because these tumor cells express only the activator ligand, MSLN. In contrast, normal cells that express MSLN plus the non-target antigen are protected from the adoptive immune cells. The inhibitory receptor response to the non-target antigen on normal cells prevents activation of immune cells by the MSLN-targeted activator receptor. This dual-targeting approach creates the therapeutic window that will allow a MSLN-directed cell therapy to be dosed safely and effectively in MSLN-positive cancer patients.

[0105] The disclosure provides methods and compositions that allow the use of potent MSLN CAR and TCRs that induce on-target toxicity, and renders these MSLN targeted receptors useful as a therapeutic by mitigating their toxicity.

[0106] In variations, the compositions and methods described herein may be used to kill target cells and/or treat subjects in which expression of the non-target antigen is partially or completely decreased by causes other than loss of heterozygosity, including but not limited to partial gene deletion, epigenetic silencing, and point mutations or truncating mutations in the sequence encoding the non-target antigen.

### Definitions

[0107] Prior to setting forth this disclosure in more detail, it may be helpful to an understanding thereof to provide definitions of certain terms to be used herein.

[0108] Unless defined otherwise, all technical and scientific terms used herein have the same meaning as commonly understood by those of ordinary skill in the art to which the disclosure belongs. Although any methods and materials similar or equivalent to those described herein can be used in the practice or testing of particular embodiments, preferred embodiments of compositions, methods and materials are described herein. For the purposes of the present disclosure, the following terms are defined below. Additional definitions are set forth throughout this disclosure.

[0109] As used herein, the term “about” or “approximately” refers to a quantity, level, value, number, frequency, percentage, dimension, size, amount, weight or length that varies by as much as 15%, 10%, 9%, 8%, 7%, 6%, 5%, 4%, 3%, 2% or 1% to a reference quantity, level, value, number, frequency, percentage, dimension, size, amount, weight or length. In one embodiment, the term “about” or “approximately” refers a range of quantity, level, value, number, frequency, percentage, dimension, size, amount, weight or length±15%, ±10%, ±9%, ±8%, ±7%, ±6%, ±5%, ±4%, ±3%, ±2%, or ±1% about a reference quantity, level, value, number, frequency, percentage, dimension, size, amount, weight or length.

[0110] As used herein, the term “isolated” means material that is substantially or essentially free from components that normally accompany it in its native state. In particular embodiments, the term “obtained” or “derived” is used synonymously with isolated.

[0111] The terms “subject,” “patient” and “individual” are used interchangeably herein to refer to a vertebrate, preferably a mammal, more preferably a human. Tissues, cells, and their progeny of a biological entity obtained in vivo or cultured in vitro are also encompassed. A “subject,” “patient” or “individual” as used herein, includes any animal that exhibits pain that can be treated with the vectors, compositions, and methods contemplated herein. Suitable subjects (e.g., patients) include laboratory animals (such as mouse, rat, rabbit, or guinea pig), farm animals, and domestic animals or pets (such as a cat or dog). Non-human primates and, preferably, human patients, are included.

[0112] As used herein “treatment” or “treating,” includes any beneficial or desirable effect, and may include even minimal improvement in symptoms. “Treatment” does not necessarily indicate complete eradication or cure of the disease or condition, or associated symptoms thereof.

[0113] As used herein, “prevent,” and similar words such as “prevented,” “preventing” etc., indicate an approach for preventing, inhibiting, or reducing the likelihood of a symptom of disease. It also refers to delaying the onset or recurrence of a disease or condition or delaying the occurrence or recurrence of the symptoms of a disease. As used herein, “prevention” and similar words also includes reducing the intensity, effect, symptoms and/or burden of disease prior to onset or recurrence.

[0114] As used herein, the term “amount” refers to “an amount effective” or “an effective amount” of a virus to achieve a beneficial or desired prophylactic or therapeutic result, including clinical results.

[0115] A “therapeutically effective amount” of a virus or cell may vary according to factors such as the disease state, age, sex, and weight of the individual, and the ability of the virus or cell to elicit a desired response in the individual. A therapeutically effective amount is also one in which any toxic or detrimental effects of the virus or cell are outweighed by the therapeutically beneficial effects. The term “therapeutically effective amount” includes an amount that is effective to “treat” a subject (e.g., a patient).

[0116] An “increased” or “enhanced” amount of a physiological response, e.g., electrophysiological activity or cellular activity, is typically a “statistically significant” amount, and may include an increase that is 1.1, 1.2, 1.5, 2, 3, 4, 5, 6, 7, 8, 9, 10, 15, 20, 30 or more times (e.g., 500, 1000 times) (including all integers and decimal points in between and above 1, e.g., 1.5, 1.6, 1.7. 1.8, etc.) the level of activity in an untreated cell.

[0117] A “decreased” or “reduced” amount of a physiological response, e.g., electrophysiological activity or cellular activity, is typically a “statistically significant” amount, and may include an decrease that is 1.1, 1.2, 1.5, 2, 3, 4, 5, 6, 7, 8, 9, 10, 15, 20, 30 or more times (e.g., 500, 1000 times) (including all integers and decimal points in between and above 1, e.g., 1.5, 1.6, 1.7. 1.8, etc.) the level of activity in an untreated cell.

[0118] By “maintain,” or “preserve,” or “maintenance,” or “no change,” or “no substantial change,” or “no substantial decrease” refers generally to a physiological response that is comparable to a response caused by either vehicle, or a control molecule/composition. A comparable response is one that is not significantly different or measurable different from the reference response.

[0119] In general, “sequence identity” or “sequence homology” refers to an exact nucleotide-to-nucleotide or amino acid-to-amino acid correspondence of two polynucleotides or polypeptide sequences, respectively. Typically, techniques for determining sequence identity include determining the nucleotide sequence of a polynucleotide and/or determining the amino acid sequence encoded thereby, and comparing these sequences to a second nucleotide or amino acid sequence. Two or more sequences (polynucleotide or amino acid) can be compared by determining their “percent identity.” The percent identity of two sequences, whether nucleic acid or amino acid sequences, is the number of exact matches between two aligned sequences divided by the length of the shorter sequences and multiplied by 100. Percent identity may also be determined, for example, by comparing sequence information using the advanced BLAST computer program, including version 2.2.9, available from the National Institutes of Health. The BLAST program is based on the alignment method of Karlin and Altschul, Proc. Natl. Acad. Sci. USA 87:2264-2268 (1990) and as discussed in Altschul, et al., J. Mol. Biol. 215:403-410 (1990); Karlin And Altschul, Proc. Natl. Acad. Sci. USA 90:5873-5877 (1993); and Altschul et al., Nucleic Acids Res. 25:3389-3402 (1997). Briefly, the BLAST program defines identity as the number of identical aligned symbols (generally nucleotides or amino acids), divided by the total number of symbols in the shorter of the two sequences. The program may be used to determine percent identity over the entire length of the proteins being compared. Default parameters are provided to optimize searches with short query sequences in, for example, with the blastp program. The program also allows use of an SEG filter to mask-off segments of the query sequences as determined by the SEG program of Wootton and Federhen, Computers and Chemistry 17:149-163 (1993). Ranges of desired degrees of sequence identity are approximately 80% to 100% and integer values therebetween. Typically, the percent identities between a disclosed sequence and a claimed sequence are at least 80%, at least 85%, at least 90%, at least 95%, or at least 98%.

[0120] As used herein, a “polynucleotide system” refers to one or more polynucleotides. The one or more polynucleotides may be designed to work in concert for a particular application, or to produce a desired transformed cell.

[0121] The term “exogenous” is used herein to refer to any molecule, including nucleic acids, protein or peptides, small molecular compounds, and the like that originate from outside the organism. In contrast, the term “endogenous” refers to any molecule that originates from inside the organism (i.e., naturally produced by the organism).

[0122] The term “MOI” is used herein to refer to multiplicity of infection, which is the ratio of agents (e.g. viral particles) to infection targets (e.g. cells).

[0123] In the present description, any concentration range, percentage range, ratio range, or integer range is to be understood to include the value of any integer within the recited range and, when appropriate, fractions thereof (such as one tenth and one hundredth of an integer), unless otherwise indicated. The term “about”, when immediately preceding a number or numeral, means that the number or numeral ranges plus or minus 10%.

[0124] As used herein, a “target cell” refers to cell that is targeted by an adoptive cell therapy. For example, a target cell can be cancer cell, which can be killed by the transplanted T cells of the adoptive cell therapy. Target cells of the disclosure express a target antigen, as described herein, and do not express a non-target antigen.

[0125] As used herein, a “non-target cell” refers to cell that is not targeted by an adoptive cell therapy. For example, in an adoptive cell targeting cancer cells, normal, healthy, non-cancerous cells are non-target cells. Some, or all, non-target cells in a subject may express both the target antigen and the non-target antigen. Non-target cells in a subject may express the non-target antigen irrespective of whether or not these cells also express the target antigen.

[0126] As used herein, a “non-target allelic variant” refers to an allele of a gene whose product is expressed by non-target cells, but is not expressed by target cells. For example, a non-target allelic variant is an allele of a gene that is expressed by normal, non-cancer cells of subject, but not expressed by cancer cells of the subject. The expression of the non-target allelic variant can be lost in the cancer cells by any mechanism, including, but not limited to, loss of heterozygosity, mutation, or epigenetic modification of the gene encoding the non-target allelic variant.

[0127] As used herein, “specific to” or “specifically binds to” when used with respect to a ligand binding domain, such as an antigen binding domain, refers to a ligand binding domain that has a high specificity for a named target. Antibody specificity can viewed as a measure of the goodness of fit between the ligand binding domain and the corresponding ligand, or the ability of the ligand binding domain to discriminate between similar or even dissimilar ligands. In comparison with specificity, affinity is a measure of the strength of the binding between the ligand binding domain and ligand, such that a low-affinity ligand binding domain binds weakly and high-affinity ligand binding domain binds firmly. A ligand binding domain that is specific to a target allele is one that can discriminate between different alleles of a gene. For example, a ligand binding domain that is specific to HLA-A*02 will not bind, or bind only weakly to, other HLA-A alleles such as HLA-A*01 or HLA-A*03. The person of skill in the art will appreciate that a ligand binding domain can be said to be specific to a particular target, and yet still have low levels of binding to one or more additional targets that do not affect its function in the receptor systems described herein.

[0128] As used herein, a “target antigen,” whether referred to using the term antigen or the name of a specific antigen, refers to an antigen expressed by a target cell, such as a cancer cell. Expression of target antigen is not limited to target cells. Target antigens may be expressed by both cancer cells and normal, non-cancer cells in a subject.

[0129] As used herein, a “non-target antigen” (or “blocker antigen”) whether referred to using the term antigen or the name of a specific antigen, refers to an antigen that is expressed by normal, non-cancer cells and is not expressed in cancer cells. This difference in expression allows the inhibitory receptor to inhibit immune cell activation in the presence of non-target cells, but not in the presence of target cells.

[0130] Polymorphism refers to the presence of two or more variants of a nucleotide sequence in a population. A polymorphism may comprise one or more base changes, an insertion, a repeat, or a deletion. A polymorphism includes e.g. a simple sequence repeat (SSR) and a single nucleotide polymorphism (SNP), which is a variation, occurring when a single nucleotide of adenine (A), thymine (T), cytosine (C) or guanine (G) is altered.

[0131] As used herein, “affinity” refers to strength of binding of a ligand to a single ligand binding site on a receptor, for example an antigen for the antigen binding domain of any of the receptors described herein. Ligand binding domains can have a weaker interaction (low affinity) with their ligand, or a stronger interaction (high affinity).

[0132] Kd, or dissociation constant, is a type of equilibrium constant that measures the propensity of a larger object to separate reversibly into smaller components, such as, for example, when a macromolecular complex comprising receptor and its cognate ligand separates into the ligand and the receptor. When the Kd is high, it means that a high concentration of ligand is need to occupy the receptor, and the affinity of the receptor for the ligand is low. Conversely, a low Kd means that the ligand has a high affinity for the receptor.

[0133] As used herein, a receptor that is “responsive” or “responsive to” refers to a receptor comprising an intracellular domain, that when bound by a ligand (i.e. antigen) generates a signal corresponding to the known function of the intracellular domain. An activator receptor bound to a target antigen can generate a signal that causes activation of an immune cell expressing the activator receptor. An inhibitory receptor bound to a non-target antigen can generate an inhibitory signal that prevents or reduces an activation of an immune cell expressing the activator receptor. Responsiveness of receptors, and their ability to activate or inhibit immune cells expressing the receptors, can be assayed by any means known in the art and described herein, including, but not limited to, reporter assays and cytotoxicity assays.

[0134] As used herein, “activation” of an immune cell or an immune cell that is “activated” refers to an immune cell that can carry out one or more functions characteristic of an immune response. These functions include proliferation, release of cytokines, and cytotoxicity, i.e. killing of a target cell. Activated immune cells express markers that will be apparent to persons of skill in the art. For example, activated T cells can express one or more of CD69, CD71, CD25 and HLA-DR. An immune cell expressing an activator receptor (e.g. a MSLN CAR) can be activated by the activator receptor when it becomes responsive to the binding of the receptor to a target antigen (e.g. MSLN) expressed by the target cell. A “target antigen” can also be referred to an “activator antigen” and may be isolated or expressed by a target cell. Activation of an immune cell expressing an inhibitory receptor can be prevented when the inhibitory receptor becomes responsive to a non-target antigen (e.g. HLA-A*02), even when the activator receptor is bound to the target activator ligand. A “non-target antigen” can also be referred to as an “inhibitory ligand” or a “blocker”, and may be isolated or expressed by a target cell.

[0135] Receptor expression on an immune cell can be verified by assays that report the presence of the activator receptors and inhibitory receptors described herein. For example, a population of immune cells can be stained with a labeled molecule (e.g. a fluorophore labeled receptor-specific antibody or a fluorophore-labeled receptor-specific ligand), and quantified using fluorescence activated cell sorting (FACS) flow cytometry. This method allows a percentage of immune cells in a population of immune cells to be characterized as expressing an activator receptor, an inhibitory receptor, or both receptors. The ratio of activator receptor and inhibitory receptors expressed by the immune cells described herein can be determined by, for example, digital droplet PCR. These approaches can be used to characterize the population of cells for the production and manufacturing of the immune cells, pharmaceutical compositions, and kits described herein. For the immune cells, pharmaceutical compositions, and kits described herein, it is understood that a suitable percentage of immune cells expressing both an activator receptor and an inhibitory receptor is determined specifically for the methods described herein. For example, a suitable percentage of immune cells expressing both an activator receptor and in inhibitory receptor can be at least 50%, at least 55%, at least 60%, at least 65%, at least 70%, at least 75%, at least 80%, at least 85%, at least 90%, or at least 95%. As a further example, between 50% and 99%, between 60% and 95%, between 65% and 95%, between 65% and 90%, between 70% and 90%, between 75% and 90%, between 75% and 85%, between 80% and 99%, between 85% and 99%, between 90% and 99% or between 95% and 99% of immune cells can express both the activator receptor and the inhibitory receptor. For example, a suitable ratio of activator receptor and inhibitory receptor in an immune cell can be about 5:1, about 4:1, about 3:1, about 2:1, about 1:1, about 1:2, about 1:3, about 1:4, or about 1:5. It is understood that purification, enrichment, and/or depletion steps can be used on populations of immune cells to meet suitable values for the immune cells, pharmaceutical compositions, and kits described herein.

[0136] A responsive receptor expressed by the immune cells described herein can be verified by assays that measure the generation of a signal expected to be generated by the intracellular domain of the receptor. Reporter cell lines, such as Jurkat-Luciferase NFAT cells (Jurkat cells), can be used to characterize a responsive receptor. Jurkat cells are derived from T cells and comprise a stably integrated nuclear factor of activated T-cells (NFAT)-inducible luciferase reporter system. NFAT is a family of transcription factors required for immune cell activation, whose activation can be used as a signaling marker for T cell activation. Jurkat cells can be transduced or transfected with the activator receptors and/or inhibitory receptors described herein. The activator receptor is responsive to the binding of a ligand if the Jurkat cell expresses a luciferase reporter gene, and the level of responsiveness can be determined by the level of reporter gene expression. The presence of luciferase can be determined using any known luciferase detection reagent, such as luciferin. An inhibitory receptor is responsive to the binding of a ligand if, when co-expressed with an activator receptor in Jurkat cells, it prevents a normally responsive immune cell from expressing luciferase in response to the activator receptor. For example, the responsiveness of an inhibitory receptor can be determined and quantified in a Jurkat cell expressing both an activator and an inhibitor by observing the following: 1) the Jurkat cell expresses luciferase in the presence of activator receptor ligand and absence of inhibitory receptor ligand; and 2) luciferase expression in the Jurkat cell is reduced or eliminated in the presence of both an activator receptor ligand and an inhibitory receptor ligand. This approach can be used to determine the sensitivity, potency, and selectivity of activator receptors and specific pairs of activator receptors and inhibitory receptors. The sensitivity, potency, and selectivity can be quantified by EC50 or IC50 values using dose-response experiments, where an activator receptor ligand and/or inhibitory receptor ligand is titrated into a culture of Jurkat cells expressing an activator receptor or a specific pair of activator and inhibitory receptors. Alternatively, the EC50 and IC50 values can be determined in a co-culture of immune cells (e.g. Jurkat cells or primary immune cells) expressing an activator receptor or a specific pair of activator and inhibitory receptors and target cells expressing an increasing amount of an activator ligand or inhibitor ligand. An increasing amount of activator ligand or inhibitor ligand can be accomplished in the target cell by, for example, titration of activator ligand or inhibitor ligand encoding mRNA into target cells, or use of target cells that naturally express different levels of the target ligands. Exemplary suitable EC50 and IC50 values for the activator and inhibitory receptors as determined used target cells expressing varying amounts of the target and non-target ligands include an EC50 of 10 transcripts per million (TPM) or less for the activator receptor, for example an EC50 of between 2-10 TPM, and an IC50 of 25 TPM or less for the inhibitory receptor, for example an IC50 of 5-21 TPM.

[0137] Activation of the immune cells described herein that express an activator receptor or specific pairs of activator and inhibitory receptors can be further determined by assays that measure the viability of a target cell following co-incubation with said immune cells. The immune cells, sometimes referred to as effector cells, are co-incubated with target cells that express an activator receptor ligand, an inhibitory receptor ligand, or both an activator and inhibitory receptor ligand. Following co-incubation, viability of the target cell is measured using any method to measure viability in a cell culture. For example, viability can be determined using a mitochondrial function assay that uses a tetrazolium salt substrate to measure active mitochondrial enzymes. Viability can also be determined using imaging based methods. Target cells can express a fluorescent protein, such as green fluorescent protein or red fluorescent protein. Reduction in total cell fluorescence indicates a reduction in viability of the target cell. A reduction in viability of the target cell following incubation with immune cells expressing an activator receptor or a specific pair of activator and inhibitory receptors is interpreted as target cell-mediated activation of the immune cell. A measure of the selectivity of the immune cells can also be determined using this approach. The immune cell expressing a pair of activator and inhibitory receptors is selective if the following is observed: 1) viability is reduced in target cells expressing the activator receptor ligand but not the inhibitory receptor ligand; 2) viability is not reduced in target cells expressing both an activator receptor ligand and an inhibitory receptor ligand. From these measurements, a “specific killing” value can be derived that quantifies the percentage of immune cell activation based on the reduction in viability of target cell as a percentage of a negative control (immune cells that do not express an activator receptor). Further, from these measurements a “selectivity ratio” value can be derived that represents the ratio of the specific killing observed in target cells expressing an activator receptor ligand in the absence of inhibitory receptor ligand to the specific killing observed in target cells expressing both an activator receptor ligand and an inhibitory receptor ligand. This approach can be used to characterize the population of cells for the production and manufacturing of the immune cells, pharmaceutical compositions, and kits described herein. A suitable specific killing value for the immune cells, pharmaceutical compositions, and kits can be, for example, the following criteria: 1) at least 40%, at least 50%, at least 60%, at least 70%, at least 80%, at least 90%, at least 95%, at least 97% or at least 99% specific killing following a 48 hour co-incubation of immune cells and target cells expressing activator receptor ligand in the absence of inhibitory receptor ligand; and 2) less than or equal to 40%, less than or equal to 35%, less than or equal to 30%, less than or equal to 25%, less than or equal to 20%, less than or equal to 15%, less than or equal to 10%, less than or equal to 5%, less than or equal to 3% or less than or equal to 1% specific killing of target cell expressing both an activator receptor ligand and an inhibitory receptor ligand.

[0138] As a further example, a suitable specific killing value for the immune cells, pharmaceutical compositions and kits can be the following criteria: 1) between 30% and 99%, between 40% and 99%, between 50% and 99%, between 55% and 95%, between 60% and 95%, between 60% and 90%, between 50% and 80%, between 50% and 70% or between 50% and 60% of target cells expressing the activator ligand but not the inhibitor ligand are killed; and 2), between 1% and 40%, between 3% and 40%, between 5% and 40%, between 5% and 30%, between 10% and 30%, between 15% and 30% or between 5% and 20% of target cells expressing the activator ligand and the inhibitor ligand are killed. As a still further example, a suitable specific killing value for the immune cells, pharmaceutical compositions, and kits can be, for example, the following criteria: 1) at least 50% specific killing following a 48 hour co-incubation of immune cells and target cells expressing activator receptor ligand in the absence of inhibitory receptor ligand; and 2) less than or equal to 20% specific killing of target cell expressing both an activator receptor ligand and an inhibitory receptor ligand. As a further example, the immune cells are capable of killing at least 30%, at least 40%, at least 50%, at least 60%, at least 70%, at least 80%, at least 90%, at least 95%, at least 97% or at least 99% of target cells expressing the activator ligand and not the inhibitor ligand over a period of 6 hours, 12 hours, 18 hours, 24 hours, 30 hours, 36 hours, 42 hours, 48 hours, 54 hours, or 60 hours, while killing less than 40%, less than 30%, less than 20%, less than 10%, less than 5%, less than 3% or less than 1% of target cells expressing the activator and inhibitor ligands over the same time period.

[0139] A suitable specific killing value of the target cell expressing an activator ligand in the absence of an inhibitory ligand value for the immune cells, pharmaceutical compositions, and kits can be, for example, at least about 50% to at least about 95%. A suitable specific killing value of the target cell expressing an activator ligand in the absence of an inhibitory ligand value for the immune cells, pharmaceutical compositions, and kits can be, for example, at least about 50%, at least about 55%, at least about 60%, at least about 65%, at least about 70%, at least about 75%, at least about 80%, at least about 85%, at least about 90%, or at least about 95%. A suitable specific killing value of the target cell expressing an activator ligand in the absence of an inhibitory ligand value for the immune cells, pharmaceutical compositions, and kits can be, for example, at most about 50%, at most about 55%, at most about 60%, at most about 65%, at most about 70%, at most about 75%, at most about 80%, at most about 85%, at most about 90%, or at most about 95%. A suitable specific killing value of target cells expressing both an activator receptor ligand and an inhibitory receptor ligand for the immune cells, pharmaceutical compositions, and kits can be can be less than about 50%, less than about 45%, less than about 40%, less than about 35%, less than about 30%, less than about 25%, less than about 20%, less than about 15%, less than about 10%, or less than about 5%. The suitable specific killing value for the immune cells, pharmaceutical compositions, and kits can be can be determined following about 6 hours, about 12 hours, about 18 hours, about 24, about 30 hours, about 36 hours, about 42 hours, about 48 hours, about 54 hours, about 60 hours, about 66 hours, or about 72 hours of co-incubation of immune cells with target cells.

[0140] A suitable specific killing value of the target cell expressing an activator ligand in the absence of an inhibitory ligand value for the immune cells, pharmaceutical compositions, and kits can be, for example, at least about 50% to at least about 95%. A suitable specific killing value of the target cell expressing an activator ligand in the absence of an inhibitory ligand value for the immune cells, pharmaceutical compositions, and kits can be, for example, at least about 50%, at least about 55%, at least about 60%, at least about 65%, at least about 70%, at least about 75%, at least about 80%, at least about 85%, at least about 90%, or at least about 95%. A suitable specific killing value of the target cell expressing an activator ligand in the absence of an inhibitory ligand value for the immune cells, pharmaceutical compositions, and kits can be, for example, at most about 50%, at most about 55%, at most about 60%, at most about 65%, at most about 70%, at most about 75%, at most about 80%, at most about 85%, at most about 90%, or at most about 95%. A suitable specific killing value of target cells expressing both an activator receptor ligand and an inhibitory receptor ligand for the immune cells, pharmaceutical compositions, and kits can be can be less than about 50%, less than about 45%, less than about 40%, less than about 35%, less than about 30%, less than about 25%, less than about 20%, less than about 15%, less than about 10%, or less than about 5%. The suitable specific killing value for the immune cells, pharmaceutical compositions, and kits can be can be determined following about 6 hours, about 12 hours, about 18 hours, about 24, about 30 hours, about 36 hours, about 42 hours, about 48 hours, about 54 hours, about 60 hours, about 66 hours, or about 72 hours of co-incubation of immune cells with target cells.

[0141] As used herein, the term “functional variant” refers to a protein that has one or more amino-acid substitutions, insertions, or deletions as compared to a parental protein, and which retains one or more desired activities of the parental protein. A functional variant may be a fragment of the protein (i.e. a variant having N- and/or C-terminal deletions) that retain the one or more desired activities of the parental protein.

[0142] All publications and patents mentioned herein are hereby incorporated by reference in their entirety as if each individual publication or patent was specifically and individually indicated to be incorporated by reference. In case of conflict, the present application, including any definitions herein, will control. However, mention of any reference, article, publication, patent, patent publication, and patent application cited herein is not, and should not be taken as an acknowledgment, or any form of suggestion, that they constitute valid prior art or form part of the common general knowledge in any country in the world.

### Activator Receptors

[0143] The disclosure provides a first receptor, comprising a first extracellular ligand binding domain specific to a target antigen comprising a cancer cell-specific antigen, or a peptide antigen thereof in a complex with a major histocompatibility complex class I (MHC-I). The first receptor is an activator receptor, and mediates activation of an immune cell expressing the first receptor upon binding of the target antigen by the extracellular ligand binding domain of the first receptor. The first receptor is responsive to a target antigen (i.e. activator ligand). For example, when a target antigen binds to or contacts the first receptor, the first receptor is responsive and activates an immune cell expressing the first receptor upon binding of the target antigen by the extracellular ligand binding domain of the first receptor. In some embodiments, the first receptor is a chimeric antigen receptor (CAR). In some embodiments, the first receptor is a T cell receptor (TCR).

[0144] In some embodiments, the first receptor is humanized. As used herein, “humanized” refers to the replacement of a sequence or a subsequence in a transgene that has been isolated or derived from a non-human species with a homologous, or functionally equivalent, human sequence. For example, a humanized antibody can be created by grafting mouse CDRs into human framework sequences, followed by back substitution of certain human framework residues for the corresponding mouse residues from the source antibody.

### Activator Targets

[0145] In some embodiments, the target antigen for the first receptor is a cancer cell specific antigen. Any cell surface molecule expressed by the target cancer cells may be a suitable target antigen for the first receptor ligand binding domain. For example, a cell adhesion molecule, a cell-cell signaling molecule, an extracellular domain, a molecule involved in chemotaxis, a glycoprotein, a G protein-coupled receptor, a transmembrane, a receptor for a neurotransmitter or a voltage gated ion channel can be used as a target antigen.

[0146] In some embodiments, the target antigen is a peptide antigen of a cancer cell-specific antigen in a complex with a major histocompatibility complex class I (MHC-I). Any molecule expressed by the target cancer cells and presented by the major histocompatibility complex class I (MHC-I) on the cancer cell surface as a peptide antigen (pMHC) may be a suitable target antigen for the first receptor extracellular ligand binding domain.

[0147] In some embodiments, the cancer cell-specific antigen is Mesothelin (MSLN), or a peptide antigen thereof in a complex with a major histocompatibility complex class I (MHC-I).

[0148] The major histocompatibility complex class I (MHC-I) is a protein complex that displays antigens to cells of the immune system, triggering an immune response. The Human Leukocyte Antigens (HLAs) corresponding to MHC-I are HLA-A, HLA-B and HLA-C.

[0149] Cancer cell-specific pMHC antigens comprising any of HLA-A, HLA-B, HLA-C, HLA-E, HLA-F or HLA-G are envisaged as within the scope of the disclosure. In some embodiments, the cancer cell-specific antigen comprises HLA-A. HLA-A receptors are heterodimers comprising a heavy a chain and smaller β chain. The α chain is encoded by a variant of HLA-A, while the β chain (β2-microglobulin) is an invariant. There are several thousand variant HLA-A genes, all of which fall within the scope of the instant disclosure. In some embodiments, the MHC-I comprises a human leukocyte antigen A*02 allele (HLA-A*02).

[0150] In some embodiments, the cancer cell-specific antigen comprises HLA-B. Hundreds of versions (alleles) of the HLA-B gene are known, each of which is given a particular number (such as HLA-B*27).

[0151] In some embodiments, the cancer cell-specific antigen comprises HLA-C. HLA-C belongs to the HLA class I heavy chain paralogues. This class I molecule is a heterodimer consisting of a heavy chain and a light chain (beta-2 microglobulin). Over one hundred HLA-C alleles are known in the art.

[0152] In some embodiments, the cancer cell-specific antigen is an ovarian cancer antigen, a pancreatic cancer antigen, a lung cancer antigen, a colorectal cancer antigen or a mesothelioma antigen. In some embodiments, the cancer cell-specific antigen is a colorectal cancer antigen. In some embodiments, the cancer cell-specific antigen is MSLN or a peptide antigen thereof.

[0153] In some embodiments, the cancer cell-specific antigen is MSLN, or a peptide antigen thereof in a complex with a major histocompatibility complex class I (MHC-I). MSLN is a 40 KDa protein that is normally expressed in mesothelial cells, as well as lung, fallopian tube, salivary gland and adipose tissues (FIG. 2). MSLN is expressed in multiple human tumor types, including mesothelioma cancer, ovarian cancer, cervical cancer, colorectal cancer, esophageal cancer, head and neck cancer, kidney cancer, uterine cancer, gastric cancer, pancreatic cancer, lung cancer, colorectal cancer, or cholangiocarcinoma. In some embodiments, the cancer has relapsed in a subject. In some embodiments, the cancer is refractory to one or more prior administered anticancer therapies. In some embodiments, the cancer is metastatic.

[0154] All isoforms of MSLN are envisaged as cancer cell-specific antigens of the disclosure. MSLN isoform 1 preprotein is described in NCBI record number NP 005814.2, the contents of which are incorporated by reference herein. In some embodiments, MSLN comprises an amino acid sequence of:

(SEQ ID NO: 1)

| | |
|---|---|
| 1 | MALPTARPLL GSCGTPALGS LLFLLFSLGW VQPSRTLAGE |
| | TGQEAAPLDG VLANPPNISS |
| 61 | LSPRQLLGFP CAEVSGLSTE RVRELAVALA QKNVKLSTEQ |
| | LRCLAHRLSE PPEDLDALPL |
| 121 | DLLLFLNPDA FSGPQACTRF FSRITKANVD LLPRGAPERQ |
| | RLLPAALACW GVRGSLLSEA |
| 181 | DVRALGGLAC DLPGRFVAES AEVLLPRLVS CPGPLDQDQQ |
| | EAARAALQGG GPPYGPPSTW |
| 241 | SVSTMDALRG LLPVLGQPII RSIPQGIVAA WRQRSSRDPS |
| | WRQPERTILR PRFRREVEKT |
| 301 | ACPSGKKARE IDESLIFYKK WELEACVDAA LLATQMDRVN |
| | AIPFTYEQLD VLKHKLDELY |
| 361 | PQGYPESVIQ HLGYLFLKMS PEDIRKWNVT SLETLKALLE |
| | VNKGHEMSPQ VATLIDRFVK |
| 421 | GRGQLDKDTL DTLTAFYPGY LCSLSPEELS SVPPSSIWAV |
| | RPQDLDTCDP RQLDVLYPKA |
| 481 | RLAFQNMNGS EYFVKIQSFL GGAPTEDLKA LSQQNVSMDL |
| | ATFMKLRTDA VLPLTVAEVQ |
| 541 | KLLGPHVEGL KAEERHRPVR DWILRQRQDD LDTLGLGLQG |
| | GIPNGYLVLD LSMQEALSGT |
| 601 | PCLLGPGPVL TVLALLLAST LA. |

[0155] In some embodiments, MSLN comprises a sequence that shares at least 80%, at least 85%, at least 90%, at least 95%, at least 96%, at least 97%, at least 98%, or at least 99% identity to SEQ ID NO: 1.

[0156] MSLN isoform 2 preprotein is described in NCBI record number NP 037536.2, the contents of which are incorporated by reference herein. In some embodiments, MSLN comprises an amino acid sequence of:

(SEQ ID NO: 2)

| | |
|---|---|
| 1 | MALPTARPLL GSCGTPALGS LLFLLFSLGW VQPSRTLAGE |
| | TGQEAAPLDG VLANPPNISS |
| 61 | LSPRQLLGFP CAEVSGLSTE RVRELAVALA QKNVKLSTEQ |
| | LRCLAHRLSE PPEDLDALPL |
| 121 | DLLLFLNPDA FSGPQACTRF FSRITKANVD LLPRGAPERQ |
| | RLLPAALACW GVRGSLLSEA |
| 181 | DVRALGGLAC DLPGRFVAES AEVLLPRLVS CPGPLDQDQQ |
| | EAARAALQGG GPPYGPPSTW |
| 241 | SVSTMDALRG LLPVLGQPII RSIPQGIVAA WRQRSSRDPS |
| | WRQPERTILR PRFRREVEKT |
| 301 | ACPSGKKARE IDESLIFYKK WELEACVDAA LLATQMDRVN |
| | AIPFTYEQLD VLKHKLDELY |
| 361 | PQGYPESVIQ HLGYLFLKMS PEDIRKWNVT SLETLKALLE |
| | VNKGHEMSPQ APRRPLPQVA |
| 421 | TLIDRFVKGR GQLDKDTLDT LTAFYPGYLC SLSPEELSSV |
| | PPSSIWAVRP QDLDTCDPRQ |
| 481 | LDVLYPKARL AFQNMNGSEY FVKIQSFLGG APTEDLKALS |
| | QQNVSMDLAT FMKLRTDAVL |
| 541 | PLTVAEVQKL LGPHVEGLKA EERHRPVRDW ILRQRQDDLD |
| | TLGLGLQGGI PNGYLVLDLS |
| 601 | MQEALSGTPC LLGPGPVLTV LALLLASTLA. |

[0157] In some embodiments, MSLN comprises a sequence that shares at least 80%, at least 85%, at least 90%, at least 95%, at least 96%, at least 97%, at least 98%, or at least 99% identity to SEQ ID NO: 2.

[0158] In some embodiments, the cancer cell-specific antigen is a peptide antigen derived from MSLN. In some embodiments, the peptide antigen is comprises a sequence having at least 80%, at least 85%, at least 90%, at least 95%, at least 96%, at least 97%, at least 98%, or at least 99% identity to a subsequence of SEQ ID NO: 1 and/or SEQ ID NO: 2. In some embodiments, the peptide antigen comprises a sequence identical to a subsequence of SEQ ID NO: 1 and/or SEQ ID NO: 2.

### Extracellular Ligand Binding Domain

[0159] The disclosure provides a first receptor, comprising a first extracellular ligand binding domain specific to a target antigen. In some embodiments, the target antigen comprises a cancer cell-specific antigen.

[0160] In some embodiments, the cancer cell-specific antigen is MSLN or a MSLN-derived peptide antigen complexed with MHC-I, and the ligand binding domain of the first receptor recognizes and binds to the MSLN antigen.

[0161] Any type of ligand binding domain that can regulate the activity of a receptor in a ligand dependent manner is envisaged as within the scope of the instant disclosure. In some embodiments, the ligand binding domain is an antigen binding domain. Exemplary antigen binding domains include, inter alia, scFv, SdAb, Vβ-only domains, and TCR antigen binding domains derived from the TCR α and β chain variable domains.

[0162] Any type of antigen binding domain is envisaged as within the scope of the instant disclosure.

[0163] For example, the first extracellular ligand binding domain may be part of a contiguous polypeptide chain including, for example, a Vβ-only domain, a single domain antibody fragment (sdAb) or heavy chain antibodies HCAb, a single chain antibody (scFv) derived from a murine, humanized or human antibodies (Harlow et al., 1999, In: Using Antibodies: A Laboratory Manual, Cold Spring Harbor Laboratory Press, N.Y.; Harlow et al., 1989, In: Antibodies: A Laboratory Manual, Cold Spring Harbor, N.Y.; Houston et al., 1988, Proc. Natl. Acad. Sci. USA 85:5879-5883; Bird et al., 1988, Science 242:423-426). In some aspects, the first extracellular ligand binding domain comprises an antigen binding domain that comprises an antibody fragment. In further aspects, the first extracellular ligand binding domain comprises an antibody fragment that comprises a scFv or an sdAb.

[0164] The term “antibody,” as used herein, refers to a protein, or polypeptide sequences derived from an immunoglobulin molecule, which specifically binds to an antigen. Antibodies can be intact immunoglobulins of polyclonal or monoclonal origin, or fragments thereof and can be derived from natural or from recombinant sources.

[0165] The terms “antibody fragment” or “antibody binding domain” refer to at least one portion of an antibody, or recombinant variants thereof, that contains the antigen binding domain, i.e., an antigenic determining variable region of an intact antibody, that is sufficient to confer recognition and specific binding of the antibody fragment to a target, such as an antigen and its defined epitope. Examples of antibody fragments include, but are not limited to, Fab, Fab′, F(ab′)2, and Fv fragments, single-chain (sc)Fv (“scFv”) antibody fragments, linear antibodies, single domain antibodies (abbreviated “sdAb”) (either VL or VH), camelid VHH domains, and multi-specific antibodies formed from antibody fragments.

[0166] The term “scFv” refers to a fusion protein comprising at least one antibody fragment comprising a variable region of a light chain and at least one antibody fragment comprising a variable region of a heavy chain, wherein the light and heavy chain variable regions are contiguously linked via a short flexible polypeptide linker, and capable of being expressed as a single polypeptide chain, and wherein the scFv retains the specificity of the intact antibody from which it is derived.

[0167] “Heavy chain variable region” or “VH” (or, in the case of single domain antibodies, e.g., nanobodies, “VHH”) with regard to an antibody refers to the fragment of the heavy chain that contains three CDRs interposed between flanking stretches known as framework regions, these framework regions are generally more highly conserved than the CDRs and form a scaffold to support the CDRs.

[0168] Unless specified, as used herein a scFv may have the VL and VH variable regions in either order, e.g., with respect to the N-terminal and C-terminal ends of the polypeptide, the scFv may comprise VL-linker-VH or may comprise VH-linker-VL.

[0169] In some embodiments, the antigen binding domain of the activator and/or inhibitory receptor comprises an scFv. In some embodiments, the scFv comprises a VL and VH region joined by a linker. In some embodiments, the linker comprises a glycine serine linker, for example GGGGSGGGGSGGGGSGG (SEQ ID NO: 152). In some embodiments, the scFv further comprises a signal sequence at the N terminus of the scFv. Exemplary signal sequences include MDMRVPAQLLGLLLLWLRGARC (SEQ ID NO: 362), which is encoded by

(SEQ ID NO: 153)
ATGGACATGAGGGTCCCCGCTCAGCTCCTGGGGCTCCTGCTACTCTGGCTC
CGAGGTGCCAGATGT.

[0170] The term “antibody light chain,” refers to the smaller of the two types of polypeptide chains present in antibody molecules in their naturally occurring conformations. Kappa (“K”) and lambda (“λ”) light chains refer to the two major antibody light chain isotypes.

[0171] The term “recombinant antibody” refers to an antibody that is generated using recombinant DNA technology, such as, for example, an antibody expressed by a bacteriophage or yeast expression system. The term should also be construed to mean an antibody which has been generated by the synthesis of a DNA molecule encoding the antibody and which DNA molecule expresses an antibody protein, or an amino acid sequence specifying the antibody, wherein the DNA or amino acid sequence has been obtained using recombinant DNA or amino acid sequence technology which is available and well known in the art.

[0172] The term “Vβ domain”, “Vβ-only domain”, “β chain variable domain” or “single variable domain TCR (svd-TCR)” refers to an antigen binding domain that consists essentially of a single T Cell Receptor (TCR) beta variable domain that specifically binds to an antigen in the absence of a second TCR variable domain. The Vβ-only domain engages antigen using complementarity-determining regions (CDRs). Each Vβ-only domain contains three complement determining regions (CDR1, CDR2, and CDR3). Additional elements may be combined provided that the Vβ domain is configured to bind the epitope in the absence of a second TCR variable domain.

[0173] In some embodiments, the extracellular ligand binding domain of the first receptor comprises an antibody fragment, a single chain Fv antibody fragment (scFv), or a β chain variable domain (Vβ).

[0174] In some embodiments, the extracellular ligand binding domain of the first receptor comprises a TCR α chain variable domain and a TCR β chain variable domain.

[0175] In some embodiments, the extracellular ligand binding domain of the first receptor comprises an scFv antigen binding domain. Exemplary MSLN scFv are shown in Table 1 below.

TABLE 1
Exemplary MSLN scFv domains

| | Protein | |
|---|---|---|
| | Sequence | DNA Sequence |
| M5 | QVQLVQSGAEVEKP | CAGGTGCAGCTGGTGCAGTCTGGGGCTGAGGTGGAGAAGCCT |
| | GASVKVSCKASGYT | GGGGCCTCAGTGAAGGTCTCCTGCAAGGCTTCTGGATACACC |
| | FTDYYMHWVRQAPG | TTCACCGACTACTATATGCACTGGGTGCGACAGGCCCCTGGA |
| | QGLEWMGWINPNSG | CAAGGGCTTGAGTGGATGGGATGGATCAACCCTAACAGTGGT |
| | GTNYAQKFQGRVTM | GGCACAAACTATGCACAGAAGTTTCAGGGCAGGGTCACCATG |
| | TRDTSISTAYMELS | ACCAGGGACACGTCCATCAGCACAGCCTACATGGAGCTGAGC |
| | RLRSDDTAVYYCAS | AGGCTGAGATCTGACGACACGGCCGTGTATTACTGTGCGTCT |
| | GWDFDYWGQGTLVT | GGCTGGGACTTTGACTACTGGGGCCAGGGAACCCTGGTCACC |
| | VSSGGGGSGGGGSG | GTGTCCTCAGGCGGAGGTGGAAGCGGAGGGGGAGGATCTGGC |
| | GGGSGGDIVMTQSS | GGCGGAGGAAGCGGAGGCGACATCGTGATGACCCAGTCTTCC |
| | SLSASVGDRVTITC | TCCCTGTCTGCATCTGTCGGAGACAGAGTCACCATCACTTGC |
| | RASQSIRYYLSWYQ | CGGGCCAGTCAGAGCATTAGGTACTATTTAAGTTGGTATCAG |
| | QKPGKAPKLLIYTA | CAGAAACCAGGAAAAGCCCCTAAGCTCCTGATCTATACTGCA |
| | SILQNGVPSRFSGS | TCCATTTTACAAAATGGGGTCCCATCAAGGTTCAGTGGCAGT |
| | GSGTDFTLTISSLQ | GGATCTGGGACAGATTTCACTCTCACCATCAGCAGCCTGCAA |
| | PEDFATYYCLQTYT | CCTGAGGATTTTGCAACTTATTACTGCCTCCAGACTTACACT |
| | TPDFGPGTKVEIK | ACTCCGGACTTTGGCCCAGGGACCAAGGTGGAAATCAAA |
| | (SEQ ID NO: 3) | (SEQ ID NO: 363) |
| M14 | QVQLVQSGAEVRAP | CAGGTGCAGCTGGTGCAGTCTGGGGCTGAGGTGAGGGCACCT |
| | GASVKISCKASGFT | GGGGCCTCAGTGAAGATTTCCTGCAAGGCTTCTGGATTCACC |
| | FRGYYIHWVRQAPG | TTCAGAGGCTACTATATCCACTGGGTGCGACAGGCCCCTGGA |
| | QGLEWMGIINPSGG | CAAGGGCTTGAGTGGATGGGAATCATCAACCCTAGTGGTGGT |
| | SRAYAQKFQGRVTM | AGCAGAGCCTACGCACAGAAGTTCCAGGGCAGGGTCACCATG |
| | TRDTSTSTVYMELS | ACCAGGGACACTTCCACGAGCACAGTCTACATGGAGCTGAGC |
| | SLRSDDTAMYYCAR | AGCCTGAGATCTGACGACACGGCCATGTATTACTGTGCGAGA |
| | TASCGGDCYYLDYW | ACCGCAAGTTGTGGTGGTGACTGCTACTACCTTGACTACTGG |
| | GQGTLVTVSSGGGG | GGCCAGGGAACCCTGGTCACCGTGTCCTCAGGCGGAGGTGGA |
| | SGGGGSGGGGSGGD | AGCGGAGGGGGAGGATCTGGCGGCGGAGGAAGCGGAGGCGAC |
| | IQMTQSPPTLSASV | ATCCAGATGACCCAGTCTCCTCCCACCCTGTCTGCATCTGTA |
| | GDRVTITCRASENV | GGAGACAGAGTCACCATCACTTGCCGGGCCAGTGAGAATGTT |
| | NIWLAWYQQKPGKA | AATATCTGGTTGGCCTGGTATCAGCAGAAACCAGGGAAAGCC |
| | PKLLIYKSSSLASG | CCTAAGCTCCTGATCTATAAGTCATCCAGTTTAGCAAGTGGG |
| | VPSRFSGSGSGAEF | GTCCCATCAAGGTTCAGTGGCAGTGGATCTGGGGCAGAATTC |
| | TLTISSLQPDDFAT | ACTCTCACCATCAGCAGCCTGCAGCCTGATGATTTTGCAACT |
| | YYCQQYQSYPLTFG | TATTACTGCCAACAGTATCAAAGTTACCCCCTCACTTTCGGC |
| | GGTKVEIK (SEQ | GGAGGGACCAAGGTGGAAATCAAA (SEQ ID NO: 364) |
| | ID NO: 4) | |
| S5H | QVQLVQSGAEVKKP | CAGGTGCAGCTGGTGCAGTCTGGGGCTGAGGTGAAGAAGCCT |
| | GASVKVSCKASGYS | GGGGCCTCAGTGAAGGTTTCCTGCAAGGCTTCTGGATACTCA |
| | FTGYTMNWVRQAPG | TTCACCGGCTACACCATGAACTGGGTGAGGCAGGCCCCTGGA |
| | QRLEWMGLITPYNG | CAAAGACTTGAGTGGATGGGACTTATCACCCCTTACAATGGT |
| | ASSYNQKFRGRVTI | GCTTCTAGCTACAACCAGAAGTTCAGGGGCAGGGTCACAATC |
| | TRDTSASTAYMELS | ACTAGAGACACGTCAGCCAGCACAGCCTACATGGAGCTCTCC |
| | SLRSEDTAVYYCAR | AGCCTGAGATCTGAAGACACTGCAGTCTATTACTGTGCAAGG |
| | GGYDGRGFDYWGQG | GGGGGTTACGACGGGAGGGGTTTTGACTACTGGGGCCAGGGA |
| | TTVTVSSGGGGSGG | ACCACGGTCACCGTGTCCTCAGGCGGAGGTGGAAGCGGAGGG |
| | GGSGGGGSGGDIQM | GGAGGATCTGGCGGCGGAGGAAGCGGAGGCGACATCCAGATG |
| | TQSPSSLSASVGDR | ACCCAGTCTCCTTCAAGCTTGTCTGCATCTGTAGGAGACAGG |
| | VTITCSASSSVSYM | GTCACCATCACTTGCAGTGCCAGCTCAAGTGTAAGTTACATG |
| | HWYQQKPGKAPKRL | CACTGGTATCAGCAGAAACCAGGCAAGGCCCCTAAGAGATTG |
| | IYDTSKLASGVPSR | ATCTATGACACATCCAAATTAGCAAGTGGGGTCCCAAGTCGC |
| | FSGSGSGTEFTLTI | TTCAGTGGCAGTGGATCTGGGACCGAATTCACTCTCACCATC |
| | SSLQPEDFATYYCQ | AGCAGCTTGCAGCCTGAGGATTTTGCAACTTATTACTGCCAG |
| | QWSGYPLTFGQGTK | CAGTGGAGTGGTTACCCTCTCACGTTCGGTCAGGGGACAAAG |
| | LEIK (SEQ ID | TTGGAAATCAAA (SEQ ID NO: 365) |
| | NO: 5) | |
| S5M | QVQLQQSGPELEKP | CAGGTGCAGCTGCAGCAGTCTGGGCCTGAGCTGGAGAAGCCT |
| | GASVKISCKASGYS | GGGGCCTCAGTGAAGATTTCCTGCAAGGCTTCTGGATACTCA |
| | FTGYTMNWVKQSHG | TTCACCGGCTACACCATGAACTGGGTGAAGCAGAGCCATGGA |
| | KSLEWIGLITPYNG | AAAAGCCTTGAGTGGATTGGACTTATCACCCCTTACAATGGT |
| | ASSYNQKFRGKATL | GCTTCTAGCTACAACCAGAAGTTCAGGGGCAAGGCCACATTA |
| | TVDKSSSTAYMDLL | ACTGTAGACAAGTCATCCAGCACAGCCTACATGGACCTCCTC |
| | SLTSEDSAVYFCAR | AGCCTGACATCTGAAGACTCTGCAGTCTATTTCTGTGCAAGG |
| | GGYDGRGFDYWGQG | GGGGGTTACGACGGGAGGGGTTTTGACTACTGGGGCCAGGGA |
| | TTVTVSSGGGGSGG | ACCACGGTCACCGTGTCCTCAGGCGGAGGTGGAAGCGGAGGG |
| | GGSGGGGSGGDIEL | GGAGGATCTGGCGGCGGAGGAAGCGGAGGCGACATCGAGCTC |
| | TQSPAIMSASPGEK | ACCCAGTCTCCTGCAATCATGTCTGCATCTCCAGGAGAGAAG |
| | VTMTCSASSSVSYM | GTCACCATGACTTGCAGTGCCAGCTCAAGTGTAAGTTACATG |
| | HWYQQKSGTSPKRW | CACTGGTATCAGCAGAAATCAGGCACCTCCCCTAAGAGATGG |
| | IYDTSKLASGVPGR | ATCTATGACACATCCAAATTGGCAAGTGGGGTCCCAGGTCGC |
| | FSGSGSGNSYSLTI | TTCAGTGGCAGTGGATCTGGGAACTCTTACTCTCTCACCATC |
| | SSVEAEDDATYYCQ | AGCAGCGTGGAGGCTGAGGATGATGCAACTTATTACTGCCAG |
| | QWSGYPLTFGAGTK | CAGTGGAGTGGTTACCCTCTCACGTTCGGTGCTGGGACAAAG |
| | LEIK (SEQ ID | TTGGAAATCAAA (SEQ ID NO: 366) |
| | NO: 6) | |
| SS1 | QVQLQQSGPELEKP | ND |
| | GASVKISCKASGYS | |
| | FTGYTMNWVKQSHG | |
| | KSLEWIGLITPYNG | |
| | ASSYNQKFRGKATL | |
| | TVDKSSSTAYMDLL | |
| | SLTSEDSAVYFCAR | |
| | GGYDGRGFDYWGQG | |
| | TTVTVSSGGGGSGG | |
| | GGSGGGGSDIELTQ | |
| | SPAIMSASPGEKVT | |
| | MTCSASSSVSYMHW | |
| | YQQKSGTSPKRWIY | |
| | DTSKLASGVPGRFS | |
| | GSGSGNSYSLTISS | |
| | VEAEDDATYYCQQW | |
| | SGYPLTFGAGTKLE | |
| | I (SEQ ID NO: | |
| | 80 | |
| 1 | EVQLVESGGGLVKP | GAAGTGCAGCTGGTGGAAAGCGGCGGAGGCCTGGTGAAACCT |
| | GGSLRLSCAASGFT | GGCGGCAGCCTGAGACTGAGCTGCGCCGCCAGCGGCTTCACC |
| | FSNAWMSWVRQAPG | TTCTCGAACGCCTGGATGAGCTGGGTCCGCCAGGCCCCTGGC |
| | KGLEWVGRIKSKTD | AAGGGACTGGAATGGGTCGGACGGATCAAGAGCAAGACCGAC |
| | GGTTDYAAPVKGRF | GGCGGCACCACCGACTACGCTGCCCCCGTGAAGGGCCGGTTC |
| | TISRDDSKNTLYLQ | ACCATCAGCCGGGACGACAGCAAGAACACCCTGTACCTGCAG |
| | MNSLKTEDTAVYYC | ATGAACAGCCTGAAAACCGAGGACACCGCCGTGTATTACTGT |
| | TTDLPKLRNFHIWG | ACCACAGATCTTCCTAAGCTTAGGAATTTTCATATTTGGGGC |
| | QGTLVTVSSGGGGS | CAGGGAACCCTGGTCACCGTGTCCTCAGGCGGAGGTGGAAGC |
| | GGGGSGGGGSGGDI | GGAGGGGGAGGATCTGGCGGCGGAGGAAGCGGAGGCGACATC |
| | QMTQSPSSLSASVG | CAGATGACCCAGTCTCCATCCTCCCTGTCTGCATCTGTAGGA |
| | DRVTITCRASQSIS | GACAGAGTCACCATCACTTGCCGGGCAAGTCAGAGCATTAGC |
| | SYLNWYQQKPGKAP | AGCTATTTAAATTGGTATCAGCAGAAACCAGGGAAAGCCCCT |
| | KLLIYAASSLQSGV | AAGCTCCTGATCTATGCTGCATCCAGTTTGCAAAGTGGGGTC |
| | PSRFSGSGSGTDFT | CCATCAAGGTTCAGTGGCAGTGGATCTGGGACAGATTTCACT |
| | LTISSLQPEDFATY | CTCACCATCAGCAGTCTGCAACCTGAAGATTTTGCAACTTAC |
| | YCQQSYSTPLTFGG | TACTGTCAACAGAGTTACAGTACCCCTCTCACTTTCGGCGGC |
| | GTKVEIK (SEQ | GGAACAAAGGTGGAGATCAAG (SEQ ID NO: 367) |
| | ID NO: 154) | |
| 2 | EVQLVESGGGLVQP | GAAGTGCAGCTGGTGGAAAGCGGCGGAGGCCTGGTGCAGCCT |
| | GGSLRLSCAASGFT | GGCGGCAGCCTGAGACTGTCTTGCGCCGCCAGCGGCTTCACC |
| | FSSYAMHWVRQAPG | TTCAGCAGCTACGCCATGCACTGGGTCCGCCAGGCCCCTGGC |
| | KGLEYVSAISSNGG | AAGGGACTGGAATACGTGTCCGCCATCAGCTCGAACGGCGGC |
| | STYYANSVKGRFTI | AGCACCTACTACGCCAACAGCGTGAAGGGCCGGTTCACCATC |
| | SRDNSKNTLYLQMG | AGCCGGGACAACAGCAAGAACACCCTGTACCTGCAGATGGGC |
| | SLRAEDMAVYYCAS | AGCCTGCGGGCCGAGGATATGGCCGTGTATTACTGTGCGAGC |
| | LEYHGFRQYGLRYW | CTAGAATACCATGGCTTTCGACAATATGGGCTTCGTTATTGG |
| | HWGQGTLVTVSSGG | CATTGGGGCCAGGGAACCCTGGTCACCGTGTCCTCAGGCGGA |
| | GGSGGGGSGGGGSG | GGTGGAAGCGGAGGGGGAGGATCTGGCGGCGGAGGAAGCGGA |
| | GDIQMTQSPSSLSA | GGCGACATCCAGATGACCCAGTCTCCATCCTCCCTGTCTGCA |
| | SVGDRVTITCRASQ | TCTGTAGGAGACAGAGTCACCATCACTTGCCGGGCAAGTCAG |
| | SISSYLNWYQQKPG | AGCATTAGCAGCTATTTAAATTGGTATCAGCAGAAACCAGGG |
| | KAPKLLIYAASSLQ | AAAGCCCCTAAGCTCCTGATCTATGCTGCATCCAGTTTGCAA |
| | SGVPSRFSGSGSGT | AGTGGGGTCCCATCAAGGTTCAGTGGCAGTGGATCTGGGACA |
| | DFTLTISSLQPEDF | GATTTCACTCTCACCATCAGCAGTCTGCAACCTGAAGATTTT |
| | ATYYCQQSYSTPLT | GCAACTTACTACTGTCAACAGAGTTACAGTACCCCTCTCACT |
| | FGGGTKVEIK | TTCGGCGGCGGAACAAAGGTGGAGATCAAG (SEQ ID NO: |
| | (SEQ ID NO: | 368) |
| | 155) | |
| 3 | QLQLQESGSGLVKP | CAGCTGCAGCTCCAGGAAAGCGGCAGCGGCCTGGTGAAACCC |
| | SQTLSLTCAVSGGS | AGCCAGACCCTGAGCCTGACCTGTGCCGTGTCCGGCGGCAGC |
| | ISSGGYSWSWIRQP | ATCAGCAGCGGCGGCTACAGCTGGTCCTGGATCAGACAGCCC |
| | PGKGLEWIGYIYHS | CCTGGCAAGGGCCTGGAATGGATCGGCTACATCTACCACAGC |
| | GSTYYNPSLKSRVT | GGCTCGACCTACTACAACCCCAGCCTGAAGTCCAGAGTGACC |
| | ISVDRSKNQFSLKL | ATCAGCGTGGACAGAAGCAAGAACCAGTTCAGCCTGAAGCTG |
| | SSVTAADTAVYYCA | AGCAGCGTGACAGCCGCCGACACCGCTGTGTATTACTGTGCC |
| | SIKFWFAGINYFFP | AGCATAAAATTCTGGTTTGCGGGGATTAATTATTTTTTTCCG |
| | WGQGTLVTVSSGGG | TGGGGCCAGGGAACCCTGGTCACCGTGTCCTCAGGCGGAGGT |
| | GSGGGGSGGGGSGG | GGAAGCGGAGGGGGAGGATCTGGCGGCGGAGGAAGCGGAGGC |
| | DIQMTQSPSSLSAS | GACATCCAGATGACCCAGTCTCCATCCTCCCTGTCTGCATCT |
| | VGDRVTITCRASQS | GTAGGAGACAGAGTCACCATCACTTGCCGGGCAAGTCAGAGC |
| | ISSYLNWYQQKPGK | ATTAGCAGCTATTTAAATTGGTATCAGCAGAAACCAGGGAAA |
| | APKLLIYAASSLQS | GCCCCTAAGCTCCTGATCTATGCTGCATCCAGTTTGCAAAGT |
| | GVPSRFSGSGSGTD | GGGGTCCCATCAAGGTTCAGTGGCAGTGGATCTGGGACAGAT |
| | FTLTISSLQPEDFA | TTCACTCTCACCATCAGCAGTCTGCAACCTGAAGATTTTGCA |
| | TYYCQQSYSTPLTF | ACTTACTACTGTCAACAGAGTTACAGTACCCCTCTCACTTTC |
| | GGGTKVEIK (SEQ | GGCGGCGGAACAAAGGTGGAGATCAAG (SEQ ID NO: |
| | ID NO: 156) | 369) |
| 4 | EVQLVESGGGLVQP | GAAGTGCAGCTGGTGGAAAGCGGCGGAGGCCTGGTGCAGCCT |
| | GGSLRLSCAASGFT | GGCGGCAGCCTGAGACTGTCTTGCGCCGCCAGCGGCTTCACC |
| | FSSYWMHWVRQAPG | TTCAGCAGCTACTGGATGCACTGGGTCCGCCAGGCCCCTGGC |
| | KGLVWVSRINSDGS | AAGGGACTGGTCTGGGTGTCTCGAATCAACAGCGACGGCAGC |
| | STSYADSVKGRFTI | AGCACCAGCTACGCCGACAGCGTGAAGGGCCGGTTCACCATC |
| | SRDNAKNTLYLQMN | AGCCGGGACAACGCCAAGAACACCCTGTACCTGCAGATGAAC |
| | SLRAEDTAVYYCAS | AGCCTGCGGGCCGAGGACACCGCCGTGTATTACTGTGCAAGC |
| | GFLGMGSNFIWGQG | GGATTTTTGGGAATGGGCTCGAATTTTATTTGGGGCCAGGGA |
| | TLVTVSSGGGGSGG | ACCCTGGTCACCGTGTCCTCAGGCGGAGGTGGAAGCGGAGGG |
| | GGSGGGGSGGDIQM | GGAGGATCTGGCGGCGGAGGAAGCGGAGGCGACATCCAGATG |
| | TQSPSSLSASVGDR | ACCCAGTCTCCATCCTCCCTGTCTGCATCTGTAGGAGACAGA |
| | VTITCRASQSISSY | GTCACCATCACTTGCCGGGCAAGTCAGAGCATTAGCAGCTAT |
| | LNWYQQKPGKAPKL | TTAAATTGGTATCAGCAGAAACCAGGGAAAGCCCCTAAGCTC |
| | LIYAASSLQSGVPS | CTGATCTATGCTGCATCCAGTTTGCAAAGTGGGGTCCCATCA |
| | RFSGSGSGTDFTLT | AGGTTCAGTGGCAGTGGATCTGGGACAGATTTCACTCTCACC |
| | ISSLQPEDFATYYC | ATCAGCAGTCTGCAACCTGAAGATTTTGCAACTTACTACTGT |
| | QQSYSTPLTFGGGT | CAACAGAGTTACAGTACCCCTCTCACTTTCGGCGGCGGAACA |
| | KVEIK (SEQ ID | AAGGTGGAGATCAAG (SEQ ID NO: 370) |
| | NO: 157) | |
| 5 | QVQLQESGPGLVKP | CAGGTGCAGCTGCAGGAAAGCGGCCCTGGCCTGGTGAAACCC |
| | SQTLSLTCTVSGGS | AGCCAGACCCTGAGCCTGACCTGCACAGTGTCCGGCGGCAGC |
| | ISSGGYYWSWIRQH | ATCAGCAGCGGCGGCTACTACTGGTCCTGGATCAGACAGCAC |
| | PGKGLEWIGYIYYS | CCCGGCAAGGGCCTGGAATGGATCGGCTACATCTACTACAGC |
| | GSTYYNPSLKSLVT | GGCAGCACCTACTACAACCCCAGCCTGAAGTCCCTGGTGACA |
| | ISVDTSKNQFSLKL | ATCTCCGTCGATACCAGCAAGAACCAGTTCAGCCTGAAGCTG |
| | SSVTAADTAVYYCA | AGCAGCGTGACAGCCGCCGACACCGCTGTGTATTACTGTGCA |
| | SGDRARYFDLWGRG | AGCGGGGACAGGGCACGGTACTTCGATCTCTGGGGCCGTGGC |
| | TLVTVSSGGGGSGG | ACCCTGGTCACTGTGTCCTCAGGCGGAGGTGGAAGCGGAGGG |
| | GGSGGGGSGGDIQM | GGAGGATCTGGCGGCGGAGGAAGCGGAGGCGACATCCAGATG |
| | TQSPSSLSASVGDR | ACCCAGTCTCCATCCTCCCTGTCTGCATCTGTAGGAGACAGA |
| | VTITCRASQSISSY | GTCACCATCACTTGCCGGGCAAGTCAGAGCATTAGCAGCTAT |
| | LNWYQQKPGKAPKL | TTAAATTGGTATCAGCAGAAACCAGGGAAAGCCCCTAAGCTC |
| | LIYAASSLQSGVPS | CTGATCTATGCTGCATCCAGTTTGCAAAGTGGGGTCCCATCA |
| | RFSGSGSGTDFTLT | AGGTTCAGTGGCAGTGGATCTGGGACAGATTTCACTCTCACC |
| | ISSLQPEDFATYYC | ATCAGCAGTCTGCAACCTGAAGATTTTGCAACTTACTACTGT |
| | QQSYSTPLTFGGGT | CAACAGAGTTACAGTACCCCTCTCACTTTCGGCGGCGGAACA |
| | KVEIK (SEQ ID | AAGGTGGAGATCAAG (SEQ ID NO: 371) |
| | NO: 158) | |
| 6 | EVQLVESGGGLVQP | GAAGTGCAGCTGGTGGAAAGCGGCGGAGGCCTGGTGCAGCCT |
| | GGSLRLSCAASGFT | GGCGGCAGCCTGAGACTGTCTTGCGCCGCCAGCGGCTTCACC |
| | FSSYWMHWVRQAPG | TTCAGCAGCTACTGGATGCACTGGGTCCGCCAGGCCCCTGGC |
| | KGLVWVSRINSDGS | AAGGGACTGGTCTGGGTGTCTCGAATCAACAGCGACGGCAGC |
| | STSYADSVKGRFTI | AGCACCAGCTACGCCGACAGCGTGAAGGGCCGGTTCACCATC |
| | SRDNAKNTLYLQMN | AGCCGGGACAACGCCAAGAACACCCTGTACCTGCAGATGAAC |
| | SLRAEDTAVYYCAR | AGCCTGCGGGCCGAGGACACCGCCGTGTATTACTGTGCAAGA |
| | YPRGYHQMVDAFDI | TATCCACGTGGATATCATCAGATGGTTGATGCTTTTGATATC |
| | WGQGTMVTVSSGGG | TGGGGCCAAGGGACAATGGTCACCGTGTCCTCAGGCGGAGGT |
| | GSGGGGSGGGGSGG | GGAAGCGGAGGGGGAGGATCTGGCGGCGGAGGAAGCGGAGGC |
| | DIQMTQSPSSLSAS | GACATCCAGATGACCCAGTCTCCATCCTCCCTGTCTGCATCT |
| | VGDRVTITCRASQS | GTAGGAGACAGAGTCACCATCACTTGCCGGGCAAGTCAGAGC |
| | ISSYLNWYQQKPGK | ATTAGCAGCTATTTAAATTGGTATCAGCAGAAACCAGGGAAA |
| | APKLLIYAASSLQS | GCCCCTAAGCTCCTGATCTATGCTGCATCCAGTTTGCAAAGT |
| | GVPSRFSGSGSGTD | GGGGTCCCATCAAGGTTCAGTGGCAGTGGATCTGGGACAGAT |
| | FTLTISSLQPEDFA | TTCACTCTCACCATCAGCAGTCTGCAACCTGAAGATTTTGCA |
| | TYYCQQSYSTPLTF | ACTTACTACTGTCAACAGAGTTACAGTACCCCTCTCACTTTC |
| | GGGTKVEIK (SEQ | GGCGGCGGAACAAAGGTGGAGATCAAG (SEQ ID NO: |
| | ID NO: 159) | 372) |
| 7 | QLQLQESGPGLVKP | CAGCTGCAGCTCCAGGAAAGCGGCCCTGGCCTGGTGAAACCC |
| | SETLSLTCTVSGGS | AGCGAGACACTGAGCCTGACCTGCACCGTGTCCGGCGGCAGC |
| | ISSSSYYWGWIRQP | ATCAGCAGCAGCAGCTACTACTGGGGCTGGATCAGACAGCCC |
| | PGKGLEWIGSIYYS | CCTGGCAAGGGCCTGGAATGGATCGGCTCGATCTACTACAGC |
| | GSTYYNPSLKSRVT | GGCTCCACCTACTACAACCCCAGCCTGAAGTCCAGAGTGACC |
| | ISVDTSKNQFSLKL | ATCAGCGTGGACACCAGCAAGAACCAGTTCAGCCTGAAGCTG |
| | SSVTAADTAVYYCA | AGCAGCGTGACAGCCGCCGACACCGCTGTGTATTACTGTGCG |
| | RVRFLAARTTIPEA | AGAGTACGATTTTTGGCTGCTCGCACTACTATTCCGGAGGCG |
| | NFLWGQGTLVTVSS | AATTTTCTTTGGGGCCAGGGAACCCTGGTCACCGTGTCCTCA |
| | GGGGSGGGGSGGGG | GGCGGAGGTGGAAGCGGAGGGGGAGGATCTGGCGGCGGAGGA |
| | SGGDIQMTQSPSSL | AGCGGAGGCGACATCCAGATGACCCAGTCTCCATCCTCCCTG |
| | SASVGDRVTITCRA | TCTGCATCTGTAGGAGACAGAGTCACCATCACTTGCCGGGCA |
| | SQSISSYLNWYQQK | AGTCAGAGCATTAGCAGCTATTTAAATTGGTATCAGCAGAAA |
| | PGKAPKLLIYAASS | CCAGGGAAAGCCCCTAAGCTCCTGATCTATGCTGCATCCAGT |
| | LQSGVPSRFSGSGS | TTGCAAAGTGGGGTCCCATCAAGGTTCAGTGGCAGTGGATCT |
| | GTDFTLTISSLQPE | GGGACAGATTTCACTCTCACCATCAGCAGTCTGCAACCTGAA |
| | DFATYYCQQSYSTP | GATTTTGCAACTTACTACTGTCAACAGAGTTACAGTACCCCT |
| | LTFGGGTKVEIK | CTCACTTTCGGCGGCGGAACAAAGGTGGAGATCAAG (SEQ |
| | (SEQ ID NO: | ID NO: 373) |
| | 160) | |
| 8 | EVQLVESGGGLVQP | GAAGTGCAGCTGGTGGAAAGCGGCGGAGGCCTGGTGCAGCCT |
| | GGSLRLSCAASGFT | GGCGGCAGCCTGAGACTGTCTTGCGCCGCCAGCGGCTTCACC |
| | FSSYSMNWVRQAPG | TTCAGCAGCTACAGCATGAACTGGGTCCGCCAGGCCCCTGGC |
| | KGLEWVSYISSSSS | AAGGGACTGGAATGGGTGTCCTACATCAGCAGCAGCAGCTCC |
| | TIYYADSVKGRFTI | ACCATCTACTACGCCGACAGCGTGAAGGGTCGATTCACCATC |
| | SRDNAKNSLYLQMN | AGCCGGGACAACGCCAAGAACAGCCTGTACCTGCAGATGAAC |
| | SLRAEDTAVYYCAR | AGCCTGCGGGCCGAGGACACCGCCGTGTATTACTGTGCGAGA |
| | VLSRARFDYWGQGT | GTACTCTCCAGGGCTAGGTTTGACTACTGGGGCCAGGGAACC |
| | LVTVSSGGGGSGGG | CTGGTCACCGTGTCCTCAGGCGGAGGTGGAAGCGGAGGGGGA |
| | GSGGGGSGGDIQMT | GGATCTGGCGGCGGAGGAAGCGGAGGCGACATCCAGATGACC |
| | QSPSSLSASVGDRV | CAGTCTCCATCCTCCCTGTCTGCATCTGTAGGAGACAGAGTC |
| | TITCRASQSISSYL | ACCATCACTTGCCGGGCAAGTCAGAGCATTAGCAGCTATTTA |
| | NWYQQKPGKAPKLL | AATTGGTATCAGCAGAAACCAGGGAAAGCCCCTAAGCTCCTG |
| | IYAASSLQSGVPSR | ATCTATGCTGCATCCAGTTTGCAAAGTGGGGTCCCATCAAGG |
| | FSGSGSGTDFTLTI | TTCAGTGGCAGTGGATCTGGGACAGATTTCACTCTCACCATC |
| | SSLQPEDFATYYCQ | AGCAGTCTGCAACCTGAAGATTTTGCAACTTACTACTGTCAA |
| | QSYSTPLTFGGGTK | CAGAGTTACAGTACCCCTCTCACTTTCGGCGGCGGAACAAAG |
| | VEIK (SEQ ID | GTGGAGATCAAG (SEQ ID NO: 374) |
| | NO: 161) | |
| 9 | EVQLVESGGGLVKP | GAAGTGCAGCTGGTGGAAAGCGGCGGAGGCCTGGTGAAACCT |
| | GGSLRLSCAASGFT | GGCGGCAGCCTGAGACTGAGCTGCGCCGCCAGCGGCTTCACC |
| | FSSYSMNWVRQAPG | TTCAGCAGCTACAGCATGAACTGGGTCCGCCAGGCCCCTGGC |
| | KGLEWVSSISSSSS | AAGGGACTGGAATGGGTGTCCTCGATCAGCAGCAGCAGCTCC |
| | YIYYADSVKGRFTI | TACATCTACTACGCCGACAGCGTGAAGGGCCGGTTCACCATC |
| | SRDNAKNSLYLQMN | AGCCGGGACAACGCCAAGAACAGCCTGTACCTGCAGATGAAC |
| | SLRAEDTAVYYCAR | AGCCTGCGGGCCGAGGACACCGCCGTGTATTACTGTGCGAGA |
| | LRGRVFDPWGQGTL | TTACGAGGGAGGGTGTTCGACCCCTGGGGCCAGGGAACCCTG |
| | VTVSSGGGGSGGGG | GTCACCGTGTCCTCAGGCGGAGGTGGAAGCGGAGGGGGAGGA |
| | SGGGGSGGDIQMTQ | TCTGGCGGCGGAGGAAGCGGAGGCGACATCCAGATGACCCAG |
| | SPSSLSASVGDRVT | TCTCCATCCTCCCTGTCTGCATCTGTAGGAGACAGAGTCACC |
| | ITCRASQSISSYLN | ATCACTTGCCGGGCAAGTCAGAGCATTAGCAGCTATTTAAAT |
| | WYQQKPGKAPKLLI | TGGTATCAGCAGAAACCAGGGAAAGCCCCTAAGCTCCTGATC |
| | YAASSLQSGVPSRF | TATGCTGCATCCAGTTTGCAAAGTGGGGTCCCATCAAGGTTC |
| | SGSGSGTDFTLTIS | AGTGGCAGTGGATCTGGGACAGATTTCACTCTCACCATCAGC |
| | SLQPEDFATYYCQQ | AGTCTGCAACCTGAAGATTTTGCAACTTACTACTGTCAACAG |
| | SYSTPLTFGGGTKV | AGTTACAGTACCCCTCTCACTTTCGGCGGCGGAACAAAGGTG |
| | EIK (SEQ ID | GAGATCAAG (SEQ ID NO: 375) |
| | NO: 162) | |
| 10 | QLQLQESGPGLVKP | CAGCTGCAGCTCCAGGAAAGCGGCCCTGGCCTGGTGAAACCC |
| | SETLSLTCTVSGGS | AGCGAGACACTGAGCCTGACCTGCACCGTGTCCGGCGGCAGC |
| | ISSSSYYWGWIRQP | ATCAGCAGCAGCAGCTACTACTGGGGCTGGATCAGACAGCCC |
| | PGKGLEWIGSIYYS | CCTGGCAAGGGCCTGGAATGGATCGGCTCGATCTACTACAGC |
| | GSTYYNPSLKSRVT | GGCTCCACCTACTACAACCCCAGCCTGAAGTCCAGAGTGACC |
| | ISVDTSKNQFSLKL | ATCAGCGTGGACACCAGCAAGAACCAGTTCAGCCTGAAGCTG |
| | SSVTAADTAVYYCA | AGCAGCGTGACAGCCGCCGACACCGCTGTGTATTACTGTGCG |
| | RIKFTSFLYVHGFL | AGAATAAAATTTACCAGCTTTTTATATGTTCATGGTTTTCTG |
| | WGQGTLVTVSSGGG | TGGGGCCAGGGAACCCTGGTCACCGTGTCCTCAGGCGGAGGT |
| | GSGGGGSGGGGSGG | GGAAGCGGAGGGGGAGGATCTGGCGGCGGAGGAAGCGGAGGC |
| | DIQMTQSPSSLSAS | GACATCCAGATGACCCAGTCTCCATCCTCCCTGTCTGCATCT |
| | VGDRVTITCRASQS | GTAGGAGACAGAGTCACCATCACTTGCCGGGCAAGTCAGAGC |
| | ISSYLNWYQQKPGK | ATTAGCAGCTATTTAAATTGGTATCAGCAGAAACCAGGGAAA |
| | APKLLIYAASSLQS | GCCCCTAAGCTCCTGATCTATGCTGCATCCAGTTTGCAAAGT |
| | GVPSRFSGSGSGTD | GGGGTCCCATCAAGGTTCAGTGGCAGTGGATCTGGGACAGAT |
| | FTLTISSLQPEDFA | TTCACTCTCACCATCAGCAGTCTGCAACCTGAAGATTTTGCA |
| | TYYCQQSYSTPLTF | ACTTACTACTGTCAACAGAGTTACAGTACCCCTCTCACTTTC |
| | GGGTKVEIK (SEQ | GGCGGCGGAACAAAGGTGGAGATCAAG (SEQ ID NO: |
| | ID NO: 163) | 376) |
| 11 | QVQLVQSGAEVKKP | CAGGTGCAGCTGGTGCAGTCTGGCGCCGAAGTGAAGAAACCT |
| | GASVKVSCKASGYT | GGCGCCTCCGTGAAGGTGTCCTGCAAGGCCAGCGGCTACACC |
| | FTSYAMHWVRQAPG | TTCACCAGCTACGCCATGCACTGGGTTCGACAGGCCCCTGGC |
| | QRLEWMGWINAGNG | CAGAGACTGGAATGGATGGGCTGGATCAACGCCGGCAACGGC |
| | NTKYSQKFQGRVTI | AACACCAAGTACAGCCAGAAATTCCAGGGCAGAGTGACCATC |
| | TRDTSASTAYMELS | ACCCGGGACACCAGCGCCAGCACCGCCTACATGGAACTGAGC |
| | SLRSEDTAVYYCAR | AGCCTGCGGAGCGAGGACACCGCTGTGTATTACTGTGCGAGA |
| | GQRWLYLGGIRRHW | GGCCAGAGATGGCTGTACCTCGGGGGGATTCGTCGGCATTGG |
| | GQGTLVTVSSGGGG | GGCCAGGGAACCCTGGTCACCGTGTCCTCAGGCGGAGGTGGA |
| | SGGGGSGGGGSGGD | AGCGGAGGGGGAGGATCTGGCGGCGGAGGAAGCGGAGGCGAC |
| | IQMTQSPSSLSASV | ATCCAGATGACCCAGTCTCCATCCTCCCTGTCTGCATCTGTA |
| | GDRVTITCRASQSI | GGAGACAGAGTCACCATCACTTGCCGGGCAAGTCAGAGCATT |
| | SSYLNWYQQKPGKA | AGCAGCTATTTAAATTGGTATCAGCAGAAACCAGGGAAAGCC |
| | PKLLIYAASSLQSG | CCTAAGCTCCTGATCTATGCTGCATCCAGTTTGCAAAGTGGG |
| | VPSRFSGSGSGTDF | GTCCCATCAAGGTTCAGTGGCAGTGGATCTGGGACAGATTTC |
| | TLTISSLQPEDFAT | ACTCTCACCATCAGCAGTCTGCAACCTGAAGATTTTGCAACT |
| | YYCQQSYSTPLTFG | TACTACTGTCAACAGAGTTACAGTACCCCTCTCACTTTCGGC |
| | GGTKVEIK (SEQ | GGCGGAACAAAGGTGGAGATCAAG (SEQ ID NO: 377) |
| | ID NO: 164) | |
| 12 | QVQLQESGPGLVKP | CAGGTGCAGCTGCAGGAAAGCGGCCCTGGCCTGGTGAAACCC |
| | SETLSLTCTVSGGS | AGCGAGACACTGAGCCTGACCTGCACCGTGTCCGGCGGCAGC |
| | ISSYYWSWIRQPPG | ATCAGCAGCTACTACTGGTCCTGGATCAGACAGCCCCCTGGC |
| | KGLEWIGYIYYSGS | AAGGGCCTGGAATGGATCGGCTACATCTACTACAGCGGCAGC |
| | TNYNPSLKSRVTIS | ACCAACTACAACCCCAGCCTGAAGTCCAGAGTGACCATCTCC |
| | VDTSKNQFSLKLSS | GTCGATACCAGCAAGAACCAGTTCAGCCTGAAGCTGAGCAGC |
| | VTAADTAVYYCARE | GTGACAGCCGCCGACACCGCTGTGTATTACTGTGCGAGAGAA |
| | WIPSRPYYFDYWGQ | TGGATTCCCAGCCGTCCGTACTACTTTGACTACTGGGGCCAG |
| | GTLVTVSSGGGGSG | GGAACCCTGGTCACCGTGTCCTCAGGCGGAGGTGGAAGCGGA |
| | GGGSGGGGSGGDIQ | GGGGGAGGATCTGGCGGCGGAGGAAGCGGAGGCGACATCCAG |
| | MTQSPSSLSASVGD | ATGACCCAGTCTCCATCCTCCCTGTCTGCATCTGTAGGAGAC |
| | RVTITCRASQSISS | AGAGTCACCATCACTTGCCGGGCAAGTCAGAGCATTAGCAGC |
| | YLNWYQQKPGKAPK | TATTTAAATTGGTATCAGCAGAAACCAGGGAAAGCCCCTAAG |
| | LLIYAASSLQSGVP | CTCCTGATCTATGCTGCATCCAGTTTGCAAAGTGGGGTCCCA |
| | SRFSGSGSGTDFTL | TCAAGGTTCAGTGGCAGTGGATCTGGGACAGATTTCACTCTC |
| | TISSLQPEDFATYY | ACCATCAGCAGTCTGCAACCTGAAGATTTTGCAACTTACTAC |
| | CQQSYSTPLTFGGG | TGTCAACAGAGTTACAGTACCCCTCTCACTTTCGGCGGCGGA |
| | TKVEIK (SEQ ID | ACAAAGGTGGAGATCAAG (SEQ ID NO: 378) |
| | NO:165) | |
| 13 | QVQLQESGPGLVKP | CAGGTGCAGCTGCAGGAAAGCGGCCCTGGCCTGGTGAAACCC |
| | SQTLSLTCTVSGGS | AGCCAGACCCTGAGCCTGACCTGCACAGTGTCCGGCGGCTCG |
| | ISSGGYYWSWIRQP | ATCAGCAGCGGCGGCTACTACTGGTCCTGGATCAGACAGCCC |
| | PGKGLEWIGYIYYS | CCTGGCAAGGGCCTGGAATGGATCGGCTACATCTACTACAGC |
| | GSTYYNPSLKSRVT | GGCAGCACCTACTACAACCCCAGCCTGAAGTCCAGAGTGACC |
| | ISVDTSKNQFSLKL | ATCAGCGTGGACACCAGCAAGAACCAGTTCAGCCTGAAGCTG |
| | SSVTAADTAVYYCA | AGCAGCGTGACAGCCGCCGACACCGCTGTGTATTACTGTGCG |
| | RESTGTGAFDIWGQ | AGAGAAAGTACCGGTACAGGAGCTTTTGATATCTGGGGCCAA |
| | GTMVTVSSGGGGSG | GGGACAATGGTCACCGTGTCCTCAGGCGGAGGTGGAAGCGGA |
| | GGGSGGGGSGGDIQ | GGGGGAGGATCTGGCGGCGGAGGAAGCGGAGGCGACATCCAG |
| | MTQSPSSLSASVGD | ATGACCCAGTCTCCATCCTCCCTGTCTGCATCTGTAGGAGAC |
| | RVTITCRASQSISS | AGAGTCACCATCACTTGCCGGGCAAGTCAGAGCATTAGCAGC |
| | YLNWYQQKPGKAPK | TATTTAAATTGGTATCAGCAGAAACCAGGGAAAGCCCCTAAG |
| | LLIYAASSLQSGVP | CTCCTGATCTATGCTGCATCCAGTTTGCAAAGTGGGGTCCCA |
| | SRFSGSGSGTDFTL | TCAAGGTTCAGTGGCAGTGGATCTGGGACAGATTTCACTCTC |
| | TISSLQPEDFATYY | ACCATCAGCAGTCTGCAACCTGAAGATTTTGCAACTTACTAC |
| | CQQSYSTPLTFGGG | TGTCAACAGAGTTACAGTACCCCTCTCACTTTCGGCGGCGGA |
| | TKVEIK (SEQ ID | ACAAAGGTGGAGATCAAG (SEQ ID NO: 379) |
| | NO: 166) | |
| 14 | EVQLVESGGGVVRP | GAAGTGCAGCTGGTGGAAAGCGGAGGCGGAGTGGTTCGACCT |
| | GGSLRLSCAASGFT | GGCGGAAGCCTGAGACTGTCTTGCGCCGCCAGCGGCTTCACC |
| | FDDYGMSWVRQAPG | TTTGACGACTACGGCATGAGCTGGGTCCGCCAGGCCCCTGGC |
| | KGLEWVSGINWNGG | AAGGGACTGGAATGGGTGTCCGGCATCAACTGGAACGGCGGC |
| | STGYADSVKGRFTI | AGCACCGGCTACGCCGACAGCGTGAAGGGCCGGTTCACCATC |
| | SRDNAKNSLYLQMN | AGCCGGGACAACGCCAAGAACAGCCTGTACCTGCAGATGAAC |
| | SLRAEDTALYHCAR | AGCCTGCGGGCCGAGGACACCGCCTTGTATCACTGTGCGAGA |
| | ERYRRVLHWYFDLW | GAGAGGTACAGGCGGGTACTCCACTGGTACTTCGATCTCTGG |
| | GRGTLVTVSSGGGG | GGCCGTGGCACCCTGGTCACTGTGTCCTCAGGCGGAGGTGGA |
| | SGGGGSGGGGSGGD | AGCGGAGGGGGAGGATCTGGCGGCGGAGGAAGCGGAGGCGAC |
| | IQMTQSPSSLSASV | ATCCAGATGACCCAGTCTCCATCCTCCCTGTCTGCATCTGTA |
| | GDRVTITCRASQSI | GGAGACAGAGTCACCATCACTTGCCGGGCAAGTCAGAGCATT |
| | SSYLNWYQQKPGKA | AGCAGCTATTTAAATTGGTATCAGCAGAAACCAGGGAAAGCC |
| | PKLLIYAASSLQSG | CCTAAGCTCCTGATCTATGCTGCATCCAGTTTGCAAAGTGGG |
| | VPSRFSGSGSGTDF | GTCCCATCAAGGTTCAGTGGCAGTGGATCTGGGACAGATTTC |
| | TLTISSLQPEDFAT | ACTCTCACCATCAGCAGTCTGCAACCTGAAGATTTTGCAACT |
| | YYCQQSYSTPLTFG | TACTACTGTCAACAGAGTTACAGTACCCCTCTCACTTTCGGC |
| | GGTKVEIK (SEQ | GGCGGAACAAAGGTGGAGATCAAG (SEQ ID NO: 380) |
| | ID NO: 167) | |
| 15 | QVQLVQSGAEVKKP | CAGGTGCAGCTGGTGCAGTCTGGCGCCGAAGTGAAGAAACCT |
| | GASVKVSCKASGYT | GGCGCCTCCGTGAAGGTGTCCTGCAAGGCCAGCGGCTACACC |
| | FTSYDINWVRQATG | TTCACCAGCTACGACATCAACTGGGTCCGCCAGGCCACCGGA |
| | QGLEWMGWMNPNSG | CAGGGCCTGGAATGGATGGGCTGGATGAACCCCAACAGCGGC |
| | NTGYAQKFQGRVTM | AACACCGGCTACGCCCAGAAATTCCAGGGCAGAGTGACCATG |
| | TRNTSISTAYMELS | ACCCGGAACACCTCGATCAGCACCGCCTACATGGAACTGAGC |
| | SLRSEDTAVYYCAR | AGCCTGCGGAGCGAGGACACCGCTGTGTATTACTGTGCGAGA |
| | EPDAFDIWGQGTMV | GAACCGGATGCTTTTGATATCTGGGGCCAAGGGACAATGGTC |
| | TVSSGGGGSGGGGS | ACCGTGTCCTCAGGCGGAGGTGGAAGCGGAGGGGGAGGATCT |
| | GGGGSGGDIQMTQS | GGCGGCGGAGGAAGCGGAGGCGACATCCAGATGACCCAGTCT |
| | PSSLSASVGDRVTI | CCATCCTCCCTGTCTGCATCTGTAGGAGACAGAGTCACCATC |
| | TCRASQSISSYLNW | ACTTGCCGGGCAAGTCAGAGCATTAGCAGCTATTTAAATTGG |
| | YQQKPGKAPKLLIY | TATCAGCAGAAACCAGGGAAAGCCCCTAAGCTCCTGATCTAT |
| | AASSLQSGVPSRFS | GCTGCATCCAGTTTGCAAAGTGGGGTCCCATCAAGGTTCAGT |
| | GSGSGTDFTLTISS | GGCAGTGGATCTGGGACAGATTTCACTCTCACCATCAGCAGT |
| | LQPEDFATYYCQQS | CTGCAACCTGAAGATTTTGCAACTTACTACTGTCAACAGAGT |
| | YSTPLTFGGGTKVE | TACAGTACCCCTCTCACTTTCGGCGGCGGAACAAAGGTGGAG |
| | IK (SEQ ID NO: | ATCAAG (SEQ ID NO: 381) |
| | 168) | |
| 16 | QVQLQESGPGLVKP | CAGGTGCAGCTGCAGGAAAGCGGCCCTGGCCTGGTGAAACCC |
| | SQTLSLTCTVSGGS | AGCCAGACCCTGAGCCTGACCTGCACAGTGTCCGGCGGCTCG |
| | ISSGGYYWSWIRQP | ATCAGCAGCGGCGGCTACTACTGGTCCTGGATCAGACAGCCC |
| | PGKGLEWIGYIYYS | CCTGGCAAGGGCCTGGAATGGATCGGCTACATCTACTACAGC |
| | GSTYYNPSLKSRVT | GGCAGCACCTACTACAACCCCAGCCTGAAGTCCAGAGTGACC |
| | ISVDTSKNQFSLKL | ATCAGCGTGGACACCAGCAAGAACCAGTTCAGCCTGAAGCTG |
| | SSVTAADTAVYYCA | AGCAGCGTGACAGCCGCCGACACCGCTGTGTATTACTGTGCG |
| | REHMGTIPYYFDYW | AGAGAACATATGGGGACGATTCCGTACTACTTTGACTACTGG |
| | GQGTLVTVSSGGGG | GGCCAGGGAACCCTGGTCACCGTGTCCTCAGGCGGAGGTGGA |
| | SGGGGSGGGGSGGD | AGCGGAGGGGGAGGATCTGGCGGCGGAGGAAGCGGAGGCGAC |
| | IQMTQSPSSLSASV | ATCCAGATGACCCAGTCTCCATCCTCCCTGTCTGCATCTGTA |
| | GDRVTITCRASQSI | GGAGACAGAGTCACCATCACTTGCCGGGCAAGTCAGAGCATT |
| | SSYLNWYQQKPGKA | AGCAGCTATTTAAATTGGTATCAGCAGAAACCAGGGAAAGCC |
| | PKLLIYAASSLQSG | CCTAAGCTCCTGATCTATGCTGCATCCAGTTTGCAAAGTGGG |
| | VPSRFSGSGSGTDF | GTCCCATCAAGGTTCAGTGGCAGTGGATCTGGGACAGATTTC |
| | TLTISSLQPEDFAT | ACTCTCACCATCAGCAGTCTGCAACCTGAAGATTTTGCAACT |
| | YYCQQSYSTPLTFG | TACTACTGTCAACAGAGTTACAGTACCCCTCTCACTTTCGGC |
| | GGTKVEIK (SEQ | GGCGGAACAAAGGTGGAGATCAAG (SEQ ID NO: 382) |
| | ID NO: 169) | |
| 17 | QVQLQESGPGLVKP | CAGGTGCAGCTGCAGGAAAGCGGCCCTGGCCTGGTGAAACCC |
| | SQTLSLTCTVSGGS | AGCCAGACCCTGAGCCTGACCTGCACAGTGTCCGGCGGCTCG |
| | ISSGGYYWSWIRQP | ATCAGCAGCGGCGGCTACTACTGGTCCTGGATCAGACAGCCC |
| | PGKGLEWIGYIYYS | CCTGGCAAGGGCCTGGAATGGATCGGCTACATCTACTACAGC |
| | GSTYYNPSLKSRVT | GGCAGCACCTACTACAACCCCAGCCTGAAGTCCAGAGTGACC |
| | ISVDTSKNQFSLKL | ATCAGCGTGGACACCAGCAAGAACCAGTTCAGCCTGAAGCTG |
| | SSVTAADTAVYYCA | AGCAGCGTGACAGCCGCCGACACCGCTGTGTATTACTGTGCG |
| | REEFGYGDVLYWGQ | AGAGAAGAGTTTGGTTATGGGGACGTCCTCTACTGGGGCCAG |
| | GTLVTVSSGGGGSG | GGAACCCTGGTCACCGTGTCCTCAGGCGGAGGTGGAAGCGGA |
| | GGGSGGGGSGGDIQ | GGGGGAGGATCTGGCGGCGGAGGAAGCGGAGGCGACATCCAG |
| | MTQSPSSLSASVGD | ATGACCCAGTCTCCATCCTCCCTGTCTGCATCTGTAGGAGAC |
| | RVTITCRASQSISS | AGAGTCACCATCACTTGCCGGGCAAGTCAGAGCATTAGCAGC |
| | YLNWYQQKPGKAPK | TATTTAAATTGGTATCAGCAGAAACCAGGGAAAGCCCCTAAG |
| | LLIYAASSLQSGVP | CTCCTGATCTATGCTGCATCCAGTTTGCAAAGTGGGGTCCCA |
| | SRFSGSGSGTDFTL | TCAAGGTTCAGTGGCAGTGGATCTGGGACAGATTTCACTCTC |
| | TISSLQPEDFATYY | ACCATCAGCAGTCTGCAACCTGAAGATTTTGCAACTTACTAC |
| | CQQSYSTPLTFGGG | TGTCAACAGAGTTACAGTACCCCTCTCACTTTCGGCGGCGGA |
| | TKVEIK (SEQ ID | ACAAAGGTGGAGATCAAG (SEQ ID NO: 383) |
| | NO: 170) | |
| 18 | QVQLQESGPGLVKP | CAGGTGCAGCTGCAGGAAAGCGGCCCTGGCCTGGTGAAACCC |
| | SQTLSLTCTVSGGS | AGCCAGACCCTGAGCCTGACCTGCACAGTGTCCGGCGGCAGC |
| | ISSGDYYWSWIRQP | ATCAGCAGCGGCGACTACTACTGGTCCTGGATCAGACAGCCC |
| | PGKGLEWIGYIYYS | CCTGGCAAGGGCCTGGAATGGATCGGCTACATCTACTACAGC |
| | GSTYYNPSLKSRVT | GGCAGCACCTACTACAACCCCAGCCTGAAGTCTCGAGTGACC |
| | ISVDTSKNQFSLKL | ATCAGCGTGGACACCAGCAAGAACCAGTTCAGCCTGAAGCTG |
| | SSVTAADTAVYYCA | AGCAGCGTGACAGCCGCCGACACCGCTGTGTATTACTGTGCC |
| | REDVVKGAFDIWGQ | AGAGAGGACGTAGTCAAAGGCGCTTTTGATATCTGGGGCCAA |
| | GTMVTVSSGGGGSG | GGGACAATGGTCACCGTGTCCTCAGGCGGAGGTGGAAGCGGA |
| | GGGSGGGGSGGDIQ | GGGGGAGGATCTGGCGGCGGAGGAAGCGGAGGCGACATCCAG |
| | MTQSPSSLSASVGD | ATGACCCAGTCTCCATCCTCCCTGTCTGCATCTGTAGGAGAC |
| | RVTITCRASQSISS | AGAGTCACCATCACTTGCCGGGCAAGTCAGAGCATTAGCAGC |
| | YLNWYQQKPGKAPK | TATTTAAATTGGTATCAGCAGAAACCAGGGAAAGCCCCTAAG |
| | LLIYAASSLQSGVP | CTCCTGATCTATGCTGCATCCAGTTTGCAAAGTGGGGTCCCA |
| | SRFSGSGSGTDFTL | TCAAGGTTCAGTGGCAGTGGATCTGGGACAGATTTCACTCTC |
| | TISSLQPEDFATYY | ACCATCAGCAGTCTGCAACCTGAAGATTTTGCAACTTACTAC |
| | CQQSYSTPLTFGGG | TGTCAACAGAGTTACAGTACCCCTCTCACTTTCGGCGGCGGA |
| | TKVEIK (SEQ ID | ACAAAGGTGGAGATCAAG (SEQ ID NO: 384) |
| | NO: 171) | |
| 19 | EVQLVESGGGLVQP | GAAGTGCAGCTGGTGGAAAGCGGCGGAGGCCTGGTGCAGCCT |
| | GGSLRLSCAASGFT | GGCGGCAGCCTGAGACTGTCTTGCGCCGCCAGCGGCTTCACC |
| | FSSYSMNWVRQAPG | TTCAGCAGCTACAGCATGAACTGGGTCCGCCAGGCCCCTGGC |
| | KGLEWVSYISSSSS | AAGGGACTGGAATGGGTGTCCTACATCAGCAGCAGCAGCTCC |
| | TIYYADSVKGRFTI | ACCATCTACTACGCCGACAGCGTGAAGGGTCGATTCACCATC |
| | SRDNAKNSLYLQMN | AGCCGGGACAACGCCAAGAACAGCCTGTACCTGCAGATGAAC |
| | SLRAEDTAVYYCAR | AGCCTGCGGGCCGAGGACACCGCCGTGTATTACTGTGCGAGA |
| | EDFSHKLGYFQHWG | GAAGACTTCTCGCATAAGCTAGGGTACTTCCAGCACTGGGGC |
| | QGTLVTVSSGGGGS | CAGGGCACCCTGGTCACCGTGTCCTCAGGCGGAGGTGGAAGC |
| | GGGGSGGGGSGGDI | GGAGGGGGAGGATCTGGCGGCGGAGGAAGCGGAGGCGACATC |
| | QMTQSPSSLSASVG | CAGATGACCCAGTCTCCATCCTCCCTGTCTGCATCTGTAGGA |
| | DRVTITCRASQSIS | GACAGAGTCACCATCACTTGCCGGGCAAGTCAGAGCATTAGC |
| | SYLNWYQQKPGKAP | AGCTATTTAAATTGGTATCAGCAGAAACCAGGGAAAGCCCCT |
| | KLLIYAASSLQSGV | AAGCTCCTGATCTATGCTGCATCCAGTTTGCAAAGTGGGGTC |
| | PSRFSGSGSGTDFT | CCATCAAGGTTCAGTGGCAGTGGATCTGGGACAGATTTCACT |
| | LTISSLQPEDFATY | CTCACCATCAGCAGTCTGCAACCTGAAGATTTTGCAACTTAC |
| | YCQQSYSTPLTFGG | TACTGTCAACAGAGTTACAGTACCCCTCTCACTTTCGGCGGC |
| | GTKVEIK (SEQ | GGAACAAAGGTGGAGATCAAG (SEQ ID NO: 385) |
| | ID NO: 172) | |
| 20 | QVQLVESGGGLVKP | CAGGTGCAGCTGGTGGAAAGCGGCGGAGGCCTGGTGAAACCT |
| | GGSLRLSCAASGFT | GGCGGCAGCCTGAGACTGAGCTGCGCCGCCAGCGGCTTCACC |
| | FSDYYMSWIRQAPG | TTCAGCGACTACTACATGAGCTGGATCAGACAGGCCCCTGGC |
| | KGLEWVSYISSSGS | AAGGGACTGGAATGGGTGTCCTACATCAGCAGCAGCGGCTCG |
| | TIYYADSVKGRFTI | ACCATCTACTACGCCGACAGCGTGAAGGGCCGGTTCACCATC |
| | SRDNAKNSLYLQMN | AGCCGGGACAACGCCAAGAACAGCCTGTACCTGCAGATGAAC |
| | SLRAEDTAVYYCAR | AGCCTGCGGGCCGAGGACACCGCCGTGTATTACTGTGCGAGA |
| | DYDYVWGQGTLVTV | GATTACGATTACGTGTGGGGCCAGGGAACCCTGGTCACCGTG |
| | SSGGGGSGGGGSGG | TCCTCAGGCGGAGGTGGAAGCGGAGGGGGAGGATCTGGCGGC |
| | GGSGGDIQMTQSPS | GGAGGAAGCGGAGGCGACATCCAGATGACCCAGTCTCCATCC |
| | SLSASVGDRVTITC | TCCCTGTCTGCATCTGTAGGAGACAGAGTCACCATCACTTGC |
| | RASQSISSYLNWYQ | CGGGCAAGTCAGAGCATTAGCAGCTATTTAAATTGGTATCAG |
| | QKPGKAPKLLIYAA | CAGAAACCAGGGAAAGCCCCTAAGCTCCTGATCTATGCTGCA |
| | SSLQSGVPSRFSGS | TCCAGTTTGCAAAGTGGGGTCCCATCAAGGTTCAGTGGCAGT |
| | GSGTDFTLTISSLQ | GGATCTGGGACAGATTTCACTCTCACCATCAGCAGTCTGCAA |
| | PEDFATYYCQQSYS | CCTGAAGATTTTGCAACTTACTACTGTCAACAGAGTTACAGT |
| | TPLTFGGGTKVEIK | ACCCCTCTCACTTTCGGCGGCGGAACAAAGGTGGAGATCAAG |
| | (SEQ ID NO: | (SEQ ID NO: 386) |
| | 173) | |
| 21 | QVQLQESGPGLVKP | CAGGTGCAGCTGCAGGAAAGCGGCCCTGGCCTGGTGAAACCC |
| | SQTLSLTCTVSGGS | AGCCAGACCCTGAGCCTGACCTGCACAGTGTCCGGCGGCAGC |
| | ISSGDYYWSWIRQP | ATCAGCAGCGGCGACTACTACTGGTCCTGGATCAGACAGCCC |
| | PGKGLEWIGYIYYS | CCTGGCAAGGGCCTGGAATGGATCGGCTACATCTACTACAGC |
| | GSTYYNPSLKSRVT | GGCAGCACCTACTACAACCCCAGCCTGAAGTCTCGAGTGACC |
| | ISVDTSKNQFSLKL | ATCAGCGTGGACACCAGCAAGAACCAGTTCAGCCTGAAGCTG |
| | SSVTAADTAVYYCA | AGCAGCGTGACAGCCGCCGACACCGCTGTGTATTACTGTGCC |
| | RDRRDWDWFDPWGQ | AGAGATCGCCGTGATTGGGACTGGTTCGACCCCTGGGGCCAG |
| | GTLVTVSSGGGGSG | GGAACCCTGGTCACCGTGTCCTCAGGCGGAGGTGGAAGCGGA |
| | GGGSGGGGSGGDIQ | GGGGGAGGATCTGGCGGCGGAGGAAGCGGAGGCGACATCCAG |
| | MTQSPSSLSASVGD | ATGACCCAGTCTCCATCCTCCCTGTCTGCATCTGTAGGAGAC |
| | RVTITCRASQSISS | AGAGTCACCATCACTTGCCGGGCAAGTCAGAGCATTAGCAGC |
| | YLNWYQQKPGKAPK | TATTTAAATTGGTATCAGCAGAAACCAGGGAAAGCCCCTAAG |
| | LLIYAASSLQSGVP | CTCCTGATCTATGCTGCATCCAGTTTGCAAAGTGGGGTCCCA |
| | SRFSGSGSGTDFTL | TCAAGGTTCAGTGGCAGTGGATCTGGGACAGATTTCACTCTC |
| | TISSLQPEDFATYY | ACCATCAGCAGTCTGCAACCTGAAGATTTTGCAACTTACTAC |
| | CQQSYSTPLTFGGG | TGTCAACAGAGTTACAGTACCCCTCTCACTTTCGGCGGCGGA |
| | TKVEIK (SEQ ID | ACAAAGGTGGAGATCAAG (SEQ ID NO: 387) |
| | NO: 174) | |
| 22 | QVQLQESGPGLVKP | CAGGTGCAGCTGCAGGAAAGCGGCCCTGGCCTGGTGAAACCC |
| | SGTLSLTCAVSGGS | AGCGGCACCCTGAGCCTGACCTGTGCCGTGTCTGGCGGCAGC |
| | ISSSNWWSWVRQPP | ATCAGCAGCAGCAACTGGTGGTCCTGGGTCCGCCAGCCTCCC |
| | GKGLEWIGEIYHSG | GGCAAGGGCCTCGAATGGATCGGCGAGATCTACCACAGCGGC |
| | STNYNPSLKSRVTI | AGCACCAACTACAACCCCAGCCTGAAGTCCAGAGTGACCATC |
| | SVDKSKNQFSLKLS | AGCGTGGACAAGAGCAAGAACCAGTTCAGCCTGAAGCTGAGC |
| | SVTAADTAVYYCAR | AGCGTGACAGCCGCCGACACCGCTGTGTATTACTGTGCGAGA |
| | DQQALKYRVDWGQG | GATCAGCAGGCGTTGAAATACCGTGTGGATTGGGGCCAGGGA |
| | TLVTVSSGGGGSGG | ACCCTGGTCACCGTGTCCTCAGGCGGAGGTGGAAGCGGAGGG |
| | GGSGGGGSGGDIQM | GGAGGATCTGGCGGCGGAGGAAGCGGAGGCGACATCCAGATG |
| | TQSPSSLSASVGDR | ACCCAGTCTCCATCCTCCCTGTCTGCATCTGTAGGAGACAGA |
| | VTITCRASQSISSY | GTCACCATCACTTGCCGGGCAAGTCAGAGCATTAGCAGCTAT |
| | LNWYQQKPGKAPKL | TTAAATTGGTATCAGCAGAAACCAGGGAAAGCCCCTAAGCTC |
| | LIYAASSLQSGVPS | CTGATCTATGCTGCATCCAGTTTGCAAAGTGGGGTCCCATCA |
| | RFSGSGSGTDFTLT | AGGTTCAGTGGCAGTGGATCTGGGACAGATTTCACTCTCACC |
| | ISSLQPEDFATYYC | ATCAGCAGTCTGCAACCTGAAGATTTTGCAACTTACTACTGT |
| | QQSYSTPLTFGGGT | CAACAGAGTTACAGTACCCCTCTCACTTTCGGCGGCGGAACA |
| | KVEIK (SEQ ID | AAGGTGGAGATCAAG (SEQ ID NO: 388) |
| | NO: 175) | |
| 23 | QVQLVQSGAEVKKP | CAGGTGCAGCTGGTGCAGTCTGGCGCCGAAGTGAAGAAACCT |
| | GASVKVSCKASGYT | GGCGCCTCCGTGAAGGTGTCCTGCAAGGCCAGCGGCTACACC |
| | FTSYGISWVRQAPG | TTCACCAGCTACGGCATCAGCTGGGTCCGCCAGGCTCCTGGA |
| | QGLEWMGWISAYNG | CAGGGACTGGAATGGATGGGCTGGATCAGCGCCTACAACGGC |
| | NTNYAQKLQGRVTM | AACACCAACTACGCCCAGAAACTGCAGGGCAGAGTGACCATG |
| | TTDTSTSTAYMELR | ACCACCGACACCAGCACCAGCACCGCCTACATGGAACTTCGA |
| | SLRSDDTAVYYCAR | AGCCTGAGAAGCGACGACACCGCCGTGTATTACTGTGCGAGA |
| | DLTLGCFDYWGQGT | GATCTTACGCTAGGATGCTTTGACTACTGGGGCCAGGGAACC |
| | LVTVSSGGGGSGGG | CTGGTCACCGTGTCCTCAGGCGGAGGTGGAAGCGGAGGGGGA |
| | GSGGGGSGGDIQMT | GGATCTGGCGGCGGAGGAAGCGGAGGCGACATCCAGATGACC |
| | QSPSSLSASVGDRV | CAGTCTCCATCCTCCCTGTCTGCATCTGTAGGAGACAGAGTC |
| | TITCRASQSISSYL | ACCATCACTTGCCGGGCAAGTCAGAGCATTAGCAGCTATTTA |
| | NWYQQKPGKAPKLL | AATTGGTATCAGCAGAAACCAGGGAAAGCCCCTAAGCTCCTG |
| | IYAASSLQSGVPSR | ATCTATGCTGCATCCAGTTTGCAAAGTGGGGTCCCATCAAGG |
| | FSGSGSGTDFTLTI | TTCAGTGGCAGTGGATCTGGGACAGATTTCACTCTCACCATC |
| | SSLQPEDFATYYCQ | AGCAGTCTGCAACCTGAAGATTTTGCAACTTACTACTGTCAA |
| | QSYSTPLTFGGGTK | CAGAGTTACAGTACCCCTCTCACTTTCGGCGGCGGAACAAAG |
| | VEIK (SEQ ID | GTGGAGATCAAG (SEQ ID NO: 389) |
| | NO: 176) | |
| 24 | EVQLVESGGGLVQP | GAAGTGCAGCTGGTGGAAAGCGGCGGAGGCCTGGTGCAGCCT |
| | GGSLRLSCAASGFT | GGCGGCAGCCTGAGACTGTCTTGCGCCGCCAGCGGCTTCACC |
| | VSSNYMSWVRQAPG | GTGTCCAGCAACTACATGAGCTGGGTCCGCCAGGCCCCTGGC |
| | KGLEWVSVIYSGGS | AAGGGACTGGAATGGGTGTCCGTGATCTACAGCGGCGGCAGC |
| | TYYADSVKGRFTIS | ACCTACTACGCCGACAGCGTGAAGGGTCGATTCACCATCAGC |
| | RDNSKNTLYLQMNS | CGGGACAACAGCAAGAACACCCTGTACCTGCAGATGAACAGC |
| | LRAEDTAVYYCARD | CTGCGGGCCGAGGACACCGCCGTGTATTACTGTGCGAGAGAT |
| | GSNSWYFDLWGRGT | GGGTCAAACTCTTGGTACTTCGATCTCTGGGGCCGTGGCACC |
| | LVTVSSGGGGSGGG | CTGGTCACTGTGTCCTCAGGCGGAGGTGGAAGCGGAGGGGGA |
| | GSGGGGSGGDIQMT | GGATCTGGCGGCGGAGGAAGCGGAGGCGACATCCAGATGACC |
| | QSPSSLSASVGDRV | CAGTCTCCATCCTCCCTGTCTGCATCTGTAGGAGACAGAGTC |
| | TITCRASQSISSYL | ACCATCACTTGCCGGGCAAGTCAGAGCATTAGCAGCTATTTA |
| | NWYQQKPGKAPKLL | AATTGGTATCAGCAGAAACCAGGGAAAGCCCCTAAGCTCCTG |
| | IYAASSLQSGVPSR | ATCTATGCTGCATCCAGTTTGCAAAGTGGGGTCCCATCAAGG |
| | FSGSGSGTDFTLTI | TTCAGTGGCAGTGGATCTGGGACAGATTTCACTCTCACCATC |
| | SSLQPEDFATYYCQ | AGCAGTCTGCAACCTGAAGATTTTGCAACTTACTACTGTCAA |
| | QSYSTPLTFGGGTK | CAGAGTTACAGTACCCCTCTCACTTTCGGCGGCGGAACAAAG |
| | VEIK (SEQ ID | GTGGAGATCAAG (SEQ ID NO: 390) |
| | NO: 177) | |
| 25 | QVQLVESGGGVVQP | CAGGTGCAGCTGGTGGAAAGCGGCGGAGGCGTGGTGCAGCCC |
| | GRSLRLSCAASGFT | GGCAGAAGCCTTCGACTGAGCTGCGCCGCCAGCGGCTTCACC |
| | FSSYGMHWVRQAPG | TTCAGCAGCTACGGCATGCACTGGGTCCGCCAGGCCCCTGGC |
| | KGLEWVAVIWYDGS | AAGGGACTGGAATGGGTGGCCGTGATTTGGTACGACGGCAGC |
| | NKYYADSVKGRFTI | AACAAGTACTACGCCGACAGCGTGAAGGGCCGGTTCACCATC |
| | SRDNSKNTLYLQMN | AGCCGGGACAACAGCAAGAACACCCTGTACCTGCAGATGAAC |
| | SLRAEDTAVYYCAR | AGCCTGCGGGCCGAGGACACCGCCGTGTATTACTGTGCGAGG |
| | AFLFLSFSVWGQGT | GCATTTTTATTCCTGTCTTTTTCGGTTTGGGGCCAGGGAACC |
| | LVTVSSGGGGSGGG | CTGGTCACCGTGTCCTCAGGCGGAGGTGGAAGCGGAGGGGGA |
| | GSGGGGSGGDIQMT | GGATCTGGCGGCGGAGGAAGCGGAGGCGACATCCAGATGACC |
| | QSPSSLSASVGDRV | CAGTCTCCATCCTCCCTGTCTGCATCTGTAGGAGACAGAGTC |
| | TITCRASQSISSYL | ACCATCACTTGCCGGGCAAGTCAGAGCATTAGCAGCTATTTA |
| | NWYQQKPGKAPKLL | AATTGGTATCAGCAGAAACCAGGGAAAGCCCCTAAGCTCCTG |
| | IYAASSLQSGVPSR | ATCTATGCTGCATCCAGTTTGCAAAGTGGGGTCCCATCAAGG |
| | FSGSGSGTDFTLTI | TTCAGTGGCAGTGGATCTGGGACAGATTTCACTCTCACCATC |
| | SSLQPEDFATYYCQ | AGCAGTCTGCAACCTGAAGATTTTGCAACTTACTACTGTCAA |
| | QSYSTPLTFGGGTK | CAGAGTTACAGTACCCCTCTCACTTTCGGCGGCGGAACAAAG |
| | VEIK (SEQ ID | GTGGAGATCAAG (SEQ ID NO: 391) |
| | NO: 178) | |
| 26 | EVQLVESGGVVVQP | GAAGTGCAGCTGGTGGAATCTGGCGGCGTGGTGGTGCAGCCT |
| | GGSLRLSCAASGFT | GGCGGCAGCCTGAGACTGTCTTGCGCCGCCAGCGGCTTCACC |
| | FDDYTMHWVRQAPG | TTCGACGACTACACCATGCACTGGGTCCGCCAGGCCCCTGGC |
| | KGLEWVSLISWDGG | AAGGGACTGGAATGGGTGTCCCTGATCAGCTGGGACGGCGGC |
| | STYYADSVKGRFTI | TCTACCTACTACGCCGACTCCGTGAAGGGCCGGTTCACCATC |
| | SRDNSKNSLYLQMN | AGCCGGGACAACAGCAAGAACAGCCTGTACCTGCAGATGAAC |
| | SLRTEDTALYYCAK | AGCCTGCGGACCGAGGACACCGCCTTGTATTACTGTGCAAAA |
| | GIFYSSKEDFDYWG | GGGATATTCTACTCGAGTAAAGAGGATTTTGACTACTGGGGC |
| | QGTLVTVSSGGGGS | CAGGGAACCCTGGTCACCGTGTCCTCAGGCGGAGGTGGAAGC |
| | GGGGSGGGGSGGDI | GGAGGGGGAGGATCTGGCGGCGGAGGAAGCGGAGGCGACATC |
| | QMTQSPSSLSASVG | CAGATGACCCAGTCTCCATCCTCCCTGTCTGCATCTGTAGGA |
| | DRVTITCRASQSIS | GACAGAGTCACCATCACTTGCCGGGCAAGTCAGAGCATTAGC |
| | SYLNWYQQKPGKAP | AGCTATTTAAATTGGTATCAGCAGAAACCAGGGAAAGCCCCT |
| | KLLIYAASSLQSGV | AAGCTCCTGATCTATGCTGCATCCAGTTTGCAAAGTGGGGTC |
| | PSRFSGSGSGTDFT | CCATCAAGGTTCAGTGGCAGTGGATCTGGGACAGATTTCACT |
| | LTISSLQPEDFATY | CTCACCATCAGCAGTCTGCAACCTGAAGATTTTGCAACTTAC |
| | YCQQSYSTPLTFGG | TACTGTCAACAGAGTTACAGTACCCCTCTCACTTTCGGCGGC |
| | GTKVEIK (SEQ | GGAACAAAGGTGGAGATCAAG (SEQ ID NO: 392) |
| | ID NO: 179) | |
| 27 | EVQLVESGGVVVQP | GAAGTGCAGCTGGTGGAATCTGGCGGCGTGGTGGTGCAGCCT |
| | GGSLRLSCAASGFT | GGCGGCAGCCTGAGACTGTCTTGCGCCGCCAGCGGCTTCACC |
| | FDDYTMHWVRQAPG | TTCGACGACTACACCATGCACTGGGTCCGCCAGGCCCCTGGC |
| | KGLEWVSLISWDGG | AAGGGACTGGAATGGGTGTCCCTGATCAGCTGGGACGGCGGC |
| | STYYADSVKGRFTI | TCTACCTACTACGCCGACTCCGTGAAGGGCCGGTTCACCATC |
| | SRDNSKNSLYLQMN | AGCCGGGACAACAGCAAGAACAGCCTGTACCTGCAGATGAAC |
| | SLRTEDTALYYCAK | AGCCTGCGGACCGAGGACACCGCCTTGTATTACTGTGCAAAA |
| | DIWIFYSSNPKPTV | GATATATGGATATTCTACTCGAGTAATCCAAAGCCGACGGTC |
| | YWGQGTLVTVSSGG | TACTGGGGCCAGGGAACCCTGGTCACCGTGTCCTCAGGCGGA |
| | GGSGGGGSGGGGSG | GGTGGAAGCGGAGGGGGAGGATCTGGCGGCGGAGGAAGCGGA |
| | GDIQMTQSPSSLSA | GGCGACATCCAGATGACCCAGTCTCCATCCTCCCTGTCTGCA |
| | SVGDRVTITCRASQ | TCTGTAGGAGACAGAGTCACCATCACTTGCCGGGCAAGTCAG |
| | SISSYLNWYQQKPG | AGCATTAGCAGCTATTTAAATTGGTATCAGCAGAAACCAGGG |
| | KAPKLLIYAASSLQ | AAAGCCCCTAAGCTCCTGATCTATGCTGCATCCAGTTTGCAA |
| | SGVPSRFSGSGSGT | AGTGGGGTCCCATCAAGGTTCAGTGGCAGTGGATCTGGGACA |
| | DFTLTISSLQPEDF | GATTTCACTCTCACCATCAGCAGTCTGCAACCTGAAGATTTT |
| | ATYYCQQSYSTPLT | GCAACTTACTACTGTCAACAGAGTTACAGTACCCCTCTCACT |
| | FGGGTKVEIK | TTCGGCGGCGGAACAAAGGTGGAGATCAAG (SEQ ID NO: |
| | (SEQ ID NO: | 393) |
| | 180) | |
| 28 | QVQLVQSGSELKKP | CAGGTGCAGCTGGTGCAGAGCGGCAGCGAGCTGAAGAAACCT |
| | GASVKVSCKASGYT | GGCGCCTCCGTGAAGGTGTCCTGCAAGGCCAGCGGCTACACC |
| | FTSYAMNWVRQAPG | TTCACCAGCTACGCCATGAACTGGGTCCGCCAGGCCCCAGGC |
| | QGLEWMGWINTNTG | CAGGGACTGGAATGGATGGGCTGGATCAACACCAACACCGGC |
| | NPTYAQGFTGRFVF | AACCCCACCTACGCCCAGGGCTTCACCGGCAGATTCGTGTTC |
| | SFDTSVSTAYLQIC | AGCTTCGACACCAGCGTGTCCACCGCCTACCTGCAGATCTGT |
| | SLKAEDTAVYYCAR | AGCCTGAAGGCCGAGGACACCGCCGTGTATTACTGTGCGAGG |
| | KDQTLTYGNWFDPW | AAGGATCAGACGCTGACCTACGGAAACTGGTTCGACCCCTGG |
| | GQGTLVTVSSGGGG | GGCCAGGGAACCCTGGTCACCGTGTCCTCAGGCGGAGGTGGA |
| | SGGGGSGGGGSGGD | AGCGGAGGGGGAGGATCTGGCGGCGGAGGAAGCGGAGGCGAC |
| | IQMTQSPSSLSASV | ATCCAGATGACCCAGTCTCCATCCTCCCTGTCTGCATCTGTA |
| | GDRVTITCRASQSI | GGAGACAGAGTCACCATCACTTGCCGGGCAAGTCAGAGCATT |
| | SSYLNWYQQKPGKA | AGCAGCTATTTAAATTGGTATCAGCAGAAACCAGGGAAAGCC |
| | PKLLIYAASSLQSG | CCTAAGCTCCTGATCTATGCTGCATCCAGTTTGCAAAGTGGG |
| | VPSRFSGSGSGTDF | GTCCCATCAAGGTTCAGTGGCAGTGGATCTGGGACAGATTTC |
| | TLTISSLQPEDFAT | ACTCTCACCATCAGCAGTCTGCAACCTGAAGATTTTGCAACT |
| | YYCQQSYSTPLTFG | TACTACTGTCAACAGAGTTACAGTACCCCTCTCACTTTCGGC |
| | GGTKVEIK (SEQ | GGCGGAACAAAGGTGGAGATCAAG (SEQ ID NO: 394) |
| | ID NO: 181) | |
| 29 | QVQLQESGPGLVKP | CAGGTGCAGCTGCAGGAAAGCGGCCCTGGCCTGGTGAAACCC |
| | SETLSLTCTVSGGS | AGCGAGACACTGAGCCTGACCTGCACCGTGTCCGGCGGCTCT |
| | VSSGSYYWSWIRQP | GTGTCCAGCGGCTCCTACTACTGGTCCTGGATCAGACAGCCC |
| | PGKGLEWIGYIYYS | CCTGGCAAGGGCCTCGAATGGATCGGCTACATCTACTACAGC |
| | GSTNYNPSLKSRVT | GGCAGCACCAACTACAACCCCAGCCTGAAGTCCAGAGTGACC |
| | ISVDTSKNQFSLKL | ATCAGCGTGGACACCAGCAAGAACCAGTTCAGCCTGAAGCTG |
| | SSVTAADTAVYYCA | AGCAGCGTGACAGCCGCCGACACCGCTGTGTATTACTGTGCG |
| | RDHYERGLYWGQGT | AGAGATCATTACGAGCGGGGGCTCTACTGGGGCCAGGGAACC |
| | LVTVSSGGGGSGGG | CTGGTCACCGTGTCCTCAGGCGGAGGTGGAAGCGGAGGGGGA |
| | GSGGGGSGGDIQMT | GGATCTGGCGGCGGAGGAAGCGGAGGCGACATCCAGATGACC |
| | QSPSSLSASVGDRV | CAGTCTCCATCCTCCCTGTCTGCATCTGTAGGAGACAGAGTC |
| | TITCRASQSISSYL | ACCATCACTTGCCGGGCAAGTCAGAGCATTAGCAGCTATTTA |
| | NWYQQKPGKAPKLL | AATTGGTATCAGCAGAAACCAGGGAAAGCCCCTAAGCTCCTG |
| | IYAASSLQSGVPSR | ATCTATGCTGCATCCAGTTTGCAAAGTGGGGTCCCATCAAGG |
| | FSGSGSGTDFTLTI | TTCAGTGGCAGTGGATCTGGGACAGATTTCACTCTCACCATC |
| | SSLQPEDFATYYCQ | AGCAGTCTGCAACCTGAAGATTTTGCAACTTACTACTGTCAA |
| | QSYSTPLTFGGGTK | CAGAGTTACAGTACCCCTCTCACTTTCGGCGGCGGAACAAAG |
| | VEIK (SEQ ID | GTGGAGATCAAG (SEQ ID NO: 395) |
| | NO: 182) | |
| 30 | QVQLVESGGGLVKP | CAGGTGCAGCTGGTGGAAAGCGGCGGAGGCCTGGTGAAACCT |
| | GGSLRLSCAASGFT | GGCGGCAGCCTGAGACTGAGCTGCGCCGCCAGCGGCTTCACC |
| | FSDYYMSWIRQAPG | TTCAGCGACTACTACATGAGCTGGATCAGACAGGCCCCTGGC |
| | KGLEWVSYISSSGS | AAGGGACTGGAATGGGTGTCCTACATCAGCAGCAGCGGCTCG |
| | TIYYADSVKGRFTI | ACCATCTACTACGCCGACAGCGTGAAGGGCCGGTTCACCATC |
| | SRDNAKNSLYLQMN | AGCCGGGACAACGCCAAGAACAGCCTGTACCTGCAGATGAAC |
| | SLRAEDTAVYYCAR | AGCCTGCGGGCCGAGGACACCGCCGTGTATTACTGTGCGAGA |
| | YMYNWYFDLWGRGT | TATATGTATAACTGGTACTTCGATCTCTGGGGCCGTGGCACC |
| | LVTVSSGGGGSGGG | CTGGTCACTGTGTCCTCAGGCGGAGGTGGAAGCGGAGGGGGA |
| | GSGGGGSGGDIQMT | GGATCTGGCGGCGGAGGAAGCGGAGGCGACATCCAGATGACC |
| | QSPSSVSASVGDRV | CAGAGCCCCAGCAGCGTGTCCGCCAGCGTGGGCGATCGAGTG |
| | TITCRASQGISSWL | ACCATCACCTGTCGGGCCTCCCAGGGCATCAGCAGCTGGCTG |
| | AWYQQKPGKAPKLL | GCCTGGTATCAGCAGAAGCCCGGCAAGGCCCCCAAGCTGCTG |
| | IYAASSLQSGVPSR | ATCTACGCCGCCAGCAGCCTGCAGAGCGGCGTGCCAAGCAGA |
| | FSGSGSGTDFTLTI | TTCAGCGGCAGCGGCTCCGGCACCGACTTCACCCTGACCATC |
| | SSLQPEDFATYYCQ | AGCTCCCTGCAGCCCGAGGACTTCGCCACCTACTACTGCCAG |
| | QANSFPLTFGGGTK | CAGGCTAACAGTTTCCCTCTCACTTTCGGCGGCGGAACAAAG |
| | VEIK (SEQ ID | GTGGAGATCAAG (SEQ ID NO: 396) |
| | NO: 183) | |
| 31 | QVQLVESGGGLVKP | CAGGTGCAGCTGGTGGAAAGCGGCGGAGGCCTGGTGAAACCT |
| | GGSLRLSCAASGFT | GGCGGCAGCCTGAGACTGAGCTGCGCCGCCAGCGGCTTCACC |
| | FSDYYMSWIRQAPG | TTCAGCGACTACTACATGAGCTGGATCAGACAGGCCCCTGGC |
| | KGLEWVSYISSSGS | AAGGGACTGGAATGGGTGTCCTACATCAGCAGCAGCGGCTCG |
| | TIYYADSVKGRFTI | ACCATCTACTACGCCGACAGCGTGAAGGGCCGGTTCACCATC |
| | SRDNAKNSLYLQMN | AGCCGGGACAACGCCAAGAACAGCCTGTACCTGCAGATGAAC |
| | SLRAEDTAVYYCAR | AGCCTGCGGGCCGAGGACACCGCCGTGTATTACTGTGCGAGA |
| | DRRPAFDIWGQGTM | GATCGAAGGCCTGCTTTTGATATCTGGGGCCAAGGGACAATG |
| | VTVSSGGGGSGGGG | GTCACCGTGTCCTCAGGCGGAGGTGGAAGCGGAGGGGGAGGA |
| | SGGGGSGGDIQMTQ | TCTGGCGGCGGAGGAAGCGGAGGCGACATCCAGATGACCCAG |
| | SPSSVSASVGDRVT | AGCCCCAGCAGCGTGTCCGCCAGCGTGGGCGATCGAGTGACC |
| | ITCRASQGISSWLA | ATCACCTGTCGGGCCTCCCAGGGCATCAGCAGCTGGCTGGCC |
| | WYQQKPGKAPKLLI | TGGTATCAGCAGAAGCCCGGCAAGGCCCCCAAGCTGCTGATC |
| | YAASSLQSGVPSRF | TACGCCGCCAGCAGCCTGCAGAGCGGCGTGCCAAGCAGATTC |
| | SGSGSGTDFTLTIS | AGCGGCAGCGGCTCCGGCACCGACTTCACCCTGACCATCAGC |
| | SLQPEDFATYYCQQ | TCCCTGCAGCCCGAGGACTTCGCCACCTACTACTGCCAGCAG |
| | ANSFPLTFGGGTKV | GCTAACAGTTTCCCTCTCACTTTCGGCGGCGGAACAAAGGTG |
| | EIK (SEQ ID | GAGATCAAG (SEQ ID NO: 397) |
| | NO: 184) | |
| 32 | QVQLVESGGGLVKP | CAGGTGCAGCTGGTGGAAAGCGGCGGAGGCCTGGTGAAACCT |
| | GGSLRLSCAASGFT | GGCGGCAGCCTGAGACTGAGCTGCGCCGCCAGCGGCTTCACC |
| | FSDYYMSWIRQAPG | TTCAGCGACTACTACATGAGCTGGATCAGACAGGCCCCTGGC |
| | KGLEWVSYISSSGS | AAGGGACTGGAATGGGTGTCCTACATCAGCAGCAGCGGCTCG |
| | TIYYADSVKGRFTI | ACCATCTACTACGCCGACAGCGTGAAGGGCCGGTTCACCATC |
| | SRDNAKNSLYLQMN | AGCCGGGACAACGCCAAGAACAGCCTGTACCTGCAGATGAAC |
| | SLRAEDTAVYYCAV | AGCCTGCGGGCCGAGGACACCGCCGTGTATTACTGTGCGGTA |
| | HLKRRPYFDYWGQG | CATTTGAAACGACGTCCCTACTTTGACTACTGGGGCCAGGGA |
| | TLVTVSSGGGGSGG | ACCCTGGTCACCGTGTCCTCAGGCGGAGGTGGAAGCGGAGGG |
| | GGSGGGGSGGAIQL | GGAGGATCTGGCGGCGGAGGAAGCGGAGGCGCCATCCAGCTG |
| | TQSPSSLSASVGDR | ACCCAGAGCCCCAGCAGCCTGAGCGCCAGCGTGGGCGATAGA |
| | VTITCRASQGISSA | GTGACCATCACCTGTCGCGCCAGCCAGGGCATCAGCAGCGCT |
| | LAWYQQKPGKAPKL | CTGGCCTGGTATCAGCAGAAGCCCGGCAAGGCCCCCAAGCTG |
| | LIYDASSLESGVPS | CTGATCTACGACGCCAGCTCCCTGGAAAGCGGCGTGCCCAGC |
| | RFSGSGSGTDFTLT | AGATTCAGCGGCAGCGGCTCCGGCACCGACTTCACCCTGACC |
| | ISSLQPEDFATYYC | ATCAGCAGCCTGCAGCCCGAGGACTTCGCCACCTACTACTGC |
| | QQFNSYPLTFGGGT | CAGCAGTTTAATAGTTACCCTCTCACTTTCGGCGGCGGAACA |
| | KVEIK (SEQ ID | AAGGTGGAGATCAAG (SEQ ID NO: 398) |
| | NO: 185) | |
| 33 | QVQLVESGGGLVKP | CAGGTGCAGCTGGTGGAAAGCGGCGGAGGCCTGGTGAAACCT |
| | GGSLRLSCAASGFT | GGCGGCAGCCTGAGACTGAGCTGCGCCGCCAGCGGCTTCACC |
| | FSDYYMSWIRQAPG | TTCAGCGACTACTACATGAGCTGGATCAGACAGGCCCCTGGC |
| | KGLEWVSYISSSGS | AAGGGACTGGAATGGGTGTCCTACATCAGCAGCAGCGGCTCG |
| | TIYYADSVKGRFTI | ACCATCTACTACGCCGACAGCGTGAAGGGCCGGTTCACCATC |
| | SRDNAKNSLYLQMN | AGCCGGGACAACGCCAAGAACAGCCTGTACCTGCAGATGAAC |
| | SLRAEDTAVYYCAS | AGCCTGCGGGCCGAGGACACCGCCGTGTATTACTGTGCGAGC |
| | VHKKPIFDYWGQGT | GTACATAAGAAACCCATCTTTGACTACTGGGGCCAGGGAACC |
| | LVTVSSGGGGSGGG | CTGGTCACCGTGTCCTCAGGCGGAGGTGGAAGCGGAGGGGGA |
| | GSGGGGSGGAIQLT | GGATCTGGCGGCGGAGGAAGCGGAGGCGCCATCCAGCTGACC |
| | QSPSSLSASVGDRV | CAGAGCCCCAGCAGCCTGAGCGCCAGCGTGGGCGATAGAGTG |
| | TITCRASQGISSAL | ACCATCACCTGTCGCGCCAGCCAGGGCATCAGCAGCGCTCTG |
| | AWYQQKPGKAPKLL | GCCTGGTATCAGCAGAAGCCCGGCAAGGCCCCCAAGCTGCTG |
| | IYDASSLESGVPSR | ATCTACGACGCCAGCTCCCTGGAAAGCGGCGTGCCCAGCAGA |
| | FSGSGSGTDFTLTI | TTCAGCGGCAGCGGCTCCGGCACCGACTTCACCCTGACCATC |
| | SSLQPEDFATYYCQ | AGCAGCCTGCAGCCCGAGGACTTCGCCACCTACTACTGCCAG |
| | QFNSYPLTFGGGTK | CAGTTTAATAGTTACCCTCTCACTTTCGGCGGCGGAACAAAG |
| | VEIK (SEQ ID | GTGGAGATCAAG (SEQ ID NO: 399) |
| | NO: 186) | |
| 34 | QVQLVESGGGLVKP | CAGGTGCAGCTGGTGGAAAGCGGCGGAGGCCTGGTGAAACCT |
| | GGSLRLSCAASGFT | GGCGGCAGCCTGAGACTGAGCTGCGCCGCCAGCGGCTTCACC |
| | FSDYYMSWIRQAPG | TTCAGCGACTACTACATGAGCTGGATCAGACAGGCCCCTGGC |
| | KGLEWVSYISSSGS | AAGGGACTGGAATGGGTGTCCTACATCAGCAGCAGCGGCTCG |
| | TIYYADSVKGRFTI | ACCATCTACTACGCCGACAGCGTGAAGGGCCGGTTCACCATC |
| | SRDNAKNSLYLQMN | AGCCGGGACAACGCCAAGAACAGCCTGTACCTGCAGATGAAC |
| | SLRAEDTAVYYCAS | AGCCTGCGGGCCGAGGACACCGCCGTGTATTACTGTGCGAGT |
| | TSRRCTFQHWGQGT | ACCAGTCGGCGCTGTACCTTCCAGCACTGGGGCCAGGGCACC |
| | LVTVSSGGGGSGGG | CTGGTCACCGTGTCCTCAGGCGGAGGTGGAAGCGGAGGGGGA |
| | GSGGGGSGGAIQLT | GGATCTGGCGGCGGAGGAAGCGGAGGCGCCATCCAGCTGACC |
| | QSPSSLSASVGDRV | CAGAGCCCCAGCAGCCTGAGCGCCAGCGTGGGCGATAGAGTG |
| | TITCRASQGISSAL | ACCATCACCTGTCGCGCCAGCCAGGGCATCAGCAGCGCTCTG |
| | AWYQQKPGKAPKLL | GCCTGGTATCAGCAGAAGCCCGGCAAGGCCCCCAAGCTGCTG |
| | IYDASSLESGVPSR | ATCTACGACGCCAGCTCCCTGGAAAGCGGCGTGCCCAGCAGA |
| | FSGSGSGTDFTLTI | TTCAGCGGCAGCGGCTCCGGCACCGACTTCACCCTGACCATC |
| | SSLQPEDFATYYCQ | AGCAGCCTGCAGCCCGAGGACTTCGCCACCTACTACTGCCAG |
| | QFNSYPLTFGGGTK | CAGTTTAATAGTTACCCTCTCACTTTCGGCGGCGGAACAAAG |
| | VEIK (SEQ ID | GTGGAGATCAAG (SEQ ID NO: 400) |
| | NO: 187) | |
| 35 | QVQLVESGGGLVKP | CAGGTGCAGCTGGTGGAAAGCGGCGGAGGCCTGGTGAAACCT |
| | GGSLRLSCAASGFT | GGCGGCAGCCTGAGACTGAGCTGCGCCGCCAGCGGCTTCACC |
| | FSDYYMSWIRQAPG | TTCAGCGACTACTACATGAGCTGGATCAGACAGGCCCCTGGC |
| | KGLEWVSYISSSGS | AAGGGACTGGAATGGGTGTCCTACATCAGCAGCAGCGGCTCG |
| | TIYYADSVKGRFTI | ACCATCTACTACGCCGACAGCGTGAAGGGCCGGTTCACCATC |
| | SRDNAKNSLYLQMN | AGCCGGGACAACGCCAAGAACAGCCTGTACCTGCAGATGAAC |
| | SLRAEDTAVYYCAS | AGCCTGCGGGCCGAGGACACCGCCGTGTATTACTGTGCGAGT |
| | TSPRPLFQHWGQGT | ACCAGCCCGCGTCCTCTCTTCCAGCACTGGGGCCAGGGCACC |
| | LVTVSSGGGGSGGG | CTGGTCACCGTGTCCTCAGGCGGAGGTGGAAGCGGAGGGGGA |
| | GSGGGGSGGAIQLT | GGATCTGGCGGCGGAGGAAGCGGAGGCGCCATCCAGCTGACC |
| | QSPSSLSASVGDRV | CAGAGCCCCAGCAGCCTGAGCGCCAGCGTGGGCGATAGAGTG |
| | TITCRASQGISSAL | ACCATCACCTGTCGCGCCAGCCAGGGCATCAGCAGCGCTCTG |
| | AWYQQKPGKAPKLL | GCCTGGTATCAGCAGAAGCCCGGCAAGGCCCCCAAGCTGCTG |
| | IYDASSLESGVPSR | ATCTACGACGCCAGCTCCCTGGAAAGCGGCGTGCCCAGCAGA |
| | FSGSGSGTDFTLTI | TTCAGCGGCAGCGGCTCCGGCACCGACTTCACCCTGACCATC |
| | SSLQPEDFATYYCQ | AGCAGCCTGCAGCCCGAGGACTTCGCCACCTACTACTGCCAG |
| | QFNSYPLTFGGGTK | CAGTTTAATAGTTACCCTCTCACTTTCGGCGGCGGAACAAAG |
| | VEIK (SEQ ID | GTGGAGATCAAG (SEQ ID NO: 401) |
| | NO: 188) | |
| 36 | QVQLVESGGGLVKP | CAGGTGCAGCTGGTGGAAAGCGGCGGAGGCCTGGTGAAACCT |
| | GGSLRLSCAASGFT | GGCGGCAGCCTGAGACTGAGCTGCGCCGCCAGCGGCTTCACC |
| | FSDYYMSWIRQAPG | TTCAGCGACTACTACATGAGCTGGATCAGACAGGCCCCTGGC |
| | KGLEWVSYISSSGS | AAGGGACTGGAATGGGTGTCCTACATCAGCAGCAGCGGCTCG |
| | TIYYADSVKGRFTI | ACCATCTACTACGCCGACAGCGTGAAGGGCCGGTTCACCATC |
| | SRDNAKNSLYLQMN | AGCCGGGACAACGCCAAGAACAGCCTGTACCTGCAGATGAAC |
| | SLRAEDTAVYYCAS | AGCCTGCGGGCCGAGGACACCGCCGTGTATTACTGTGCGAGC |
| | PYQVRGVYFDYWGQ | CCTTACCAAGTCCGAGGAGTCTACTTTGACTACTGGGGCCAG |
| | GTLVTVSSGGGGSG | GGAACCCTGGTCACCGTGTCCTCAGGCGGAGGTGGAAGCGGA |
| | GGGSGGGGSGGAIQ | GGGGGAGGATCTGGCGGCGGAGGAAGCGGAGGCGCCATCCAG |
| | LTQSPSSLSASVGD | CTGACCCAGAGCCCCAGCAGCCTGAGCGCCAGCGTGGGCGAT |
| | RVTITCRASQGISS | AGAGTGACCATCACCTGTCGCGCCAGCCAGGGCATCAGCAGC |
| | ALAWYQQKPGKAPK | GCTCTGGCCTGGTATCAGCAGAAGCCCGGCAAGGCCCCCAAG |
| | LLIYDASSLESGVP | CTGCTGATCTACGACGCCAGCTCCCTGGAAAGCGGCGTGCCC |
| | SRFSGSGSGTDFTL | AGCAGATTCAGCGGCAGCGGCTCCGGCACCGACTTCACCCTG |
| | TISSLQPEDFATYY | ACCATCAGCAGCCTGCAGCCCGAGGACTTCGCCACCTACTAC |
| | CQQFNSYPLTFGGG | TGCCAGCAGTTTAATAGTTACCCTCTCACTTTCGGCGGCGGA |
| | TKVEIK (SEQ ID | ACAAAGGTGGAGATCAAG (SEQ ID NO: 402) |
| | NO: 189) | |
| 37 | QVQLVESGGGLVKP | CAGGTGCAGCTGGTGGAAAGCGGCGGAGGCCTGGTGAAACCT |
| | GGSLRLSCAASGFT | GGCGGCAGCCTGAGACTGAGCTGCGCCGCCAGCGGCTTCACC |
| | FSDYYMSWIRQAPG | TTCAGCGACTACTACATGAGCTGGATCAGACAGGCCCCTGGC |
| | KGLEWVSYISSSGS | AAGGGACTGGAATGGGTGTCCTACATCAGCAGCAGCGGCTCG |
| | TIYYADSVKGRFTI | ACCATCTACTACGCCGACAGCGTGAAGGGCCGGTTCACCATC |
| | SRDNAKNSLYLQMN | AGCCGGGACAACGCCAAGAACAGCCTGTACCTGCAGATGAAC |
| | SLRAEDTAVYYCAS | AGCCTGCGGGCCGAGGACACCGCCGTGTATTACTGTGCGAGC |
| | PYKKRRTVFDYWGQ | CCCTATAAGAAACGACGAACGGTCTTTGACTACTGGGGCCAG |
| | GTLVTVSSGGGGSG | GGAACCCTGGTCACCGTGTCCTCAGGCGGAGGTGGAAGCGGA |
| | GGGSGGGGSGGAIQ | GGGGGAGGATCTGGCGGCGGAGGAAGCGGAGGCGCCATCCAG |
| | LTQSPSSLSASVGD | CTGACCCAGAGCCCCAGCAGCCTGAGCGCCAGCGTGGGCGAT |
| | RVTITCRASQGISS | AGAGTGACCATCACCTGTCGCGCCAGCCAGGGCATCAGCAGC |
| | ALAWYQQKPGKAPK | GCTCTGGCCTGGTATCAGCAGAAGCCCGGCAAGGCCCCCAAG |
| | LLIYDASSLESGVP | CTGCTGATCTACGACGCCAGCTCCCTGGAAAGCGGCGTGCCC |
| | SRFSGSGSGTDFTL | AGCAGATTCAGCGGCAGCGGCTCCGGCACCGACTTCACCCTG |
| | TISSLQPEDFATYY | ACCATCAGCAGCCTGCAGCCCGAGGACTTCGCCACCTACTAC |
| | CQQFNSYPLTFGGG | TGCCAGCAGTTTAATAGTTACCCTCTCACTTTCGGCGGCGGA |
| | TKVEIK (SEQ ID | ACAAAGGTGGAGATCAAG (SEQ ID NO: 403) |
| | NO: 190) | |
| 38 | QVQLVESGGGLVKP | CAGGTGCAGCTGGTGGAAAGCGGCGGAGGCCTGGTGAAACCT |
| | GGSLRLSCAASGFT | GGCGGCAGCCTGAGACTGAGCTGCGCCGCCAGCGGCTTCACC |
| | FSDYYMSWIRQAPG | TTCAGCGACTACTACATGAGCTGGATCAGACAGGCCCCTGGC |
| | KGLEWVSYISSSGS | AAGGGACTGGAATGGGTGTCCTACATCAGCAGCAGCGGCTCG |
| | TIYYADSVKGRFTI | ACCATCTACTACGCCGACAGCGTGAAGGGCCGGTTCACCATC |
| | SRDNAKNSLYLQMN | AGCCGGGACAACGCCAAGAACAGCCTGTACCTGCAGATGAAC |
| | SLRAEDTAVYYCAS | AGCCTGCGGGCCGAGGACACCGCCGTGTATTACTGTGCGTCT |
| | LQRGLALFQHWGQG | TTACAGCGCGGGCTGGCCCTCTTCCAGCACTGGGGCCAGGGC |
| | TLVTVSSGGGGSGG | ACCCTGGTCACCGTGTCCTCAGGCGGAGGTGGAAGCGGAGGG |
| | GGSGGGGSGGAIQL | GGAGGATCTGGCGGCGGAGGAAGCGGAGGCGCCATCCAGCTG |
| | TQSPSSLSASVGDR | ACCCAGAGCCCCAGCAGCCTGAGCGCCAGCGTGGGCGATAGA |
| | VTITCRASQGISSA | GTGACCATCACCTGTCGCGCCAGCCAGGGCATCAGCAGCGCT |
| | LAWYQQKPGKAPKL | CTGGCCTGGTATCAGCAGAAGCCCGGCAAGGCCCCCAAGCTG |
| | LIYDASSLESGVPS | CTGATCTACGACGCCAGCTCCCTGGAAAGCGGCGTGCCCAGC |
| | RFSGSGSGTDFTLT | AGATTCAGCGGCAGCGGCTCCGGCACCGACTTCACCCTGACC |
| | ISSLQPEDFATYYC | ATCAGCAGCCTGCAGCCCGAGGACTTCGCCACCTACTACTGC |
| | QQFNSYPLTFGGGT | CAGCAGTTTAATAGTTACCCTCTCACTTTCGGCGGCGGAACA |
| | KVEIK (SEQ ID | AAGGTGGAGATCAAG (SEQ ID NO: 404) |
| | NO: 191) | |
| 39 | QVQLVESGGGLVKP | CAGGTGCAGCTGGTGGAAAGCGGCGGAGGCCTGGTGAAACCT |
| | GGSLRLSCAASGFT | GGCGGCAGCCTGAGACTGAGCTGCGCCGCCAGCGGCTTCACC |
| | FSDYYMSWIRQAPG | TTCAGCGACTACTACATGAGCTGGATCAGACAGGCCCCTGGC |
| | KGLEWVSYISSSGS | AAGGGACTGGAATGGGTGTCCTACATCAGCAGCAGCGGCTCG |
| | TIYYADSVKGRFTI | ACCATCTACTACGCCGACAGCGTGAAGGGCCGGTTCACCATC |
| | SRDNAKNSLYLQMN | AGCCGGGACAACGCCAAGAACAGCCTGTACCTGCAGATGAAC |
| | SLRAEDTAVYYCAS | AGCCTGCGGGCCGAGGACACCGCCGTGTATTACTGTGCTAGC |
| | ILSVPYFDLWGRGT | ATATTGTCAGTTCCGTACTTCGATCTCTGGGGCCGTGGCACC |
| | LVTVSSGGGGSGGG | CTGGTCACTGTGTCCTCAGGCGGAGGTGGAAGCGGAGGGGGA |
| | GSGGGGSGGAIQLT | GGATCTGGCGGCGGAGGAAGCGGAGGCGCCATCCAGCTGACC |
| | QSPSSLSASVGDRV | CAGAGCCCCAGCAGCCTGAGCGCCAGCGTGGGCGATAGAGTG |
| | TITCRASQGISSAL | ACCATCACCTGTCGCGCCAGCCAGGGCATCAGCAGCGCTCTG |
| | AWYQQKPGKAPKLL | GCCTGGTATCAGCAGAAGCCCGGCAAGGCCCCCAAGCTGCTG |
| | IYDASSLESGVPSR | ATCTACGACGCCAGCTCCCTGGAAAGCGGCGTGCCCAGCAGA |
| | FSGSGSGTDFTLTI | TTCAGCGGCAGCGGCTCCGGCACCGACTTCACCCTGACCATC |
| | SSLQPEDFATYYCQ | AGCAGCCTGCAGCCCGAGGACTTCGCCACCTACTACTGCCAG |
| | QFNSYPLTFGGGTK | CAGTTTAATAGTTACCCTCTCACTTTCGGCGGCGGAACAAAG |
| | VEIK (SEQ ID | GTGGAGATCAAG (SEQ ID NO: 405) |
| | NO: 192) | |
| 40 | QVQLVESGGGLVKP | CAGGTGCAGCTGGTGGAAAGCGGCGGAGGCCTGGTGAAACCT |
| | GGSLRLSCAASGFT | GGCGGCAGCCTGAGACTGAGCTGCGCCGCCAGCGGCTTCACC |
| | FSDYYMSWIRQAPG | TTCAGCGACTACTACATGAGCTGGATCAGACAGGCCCCTGGC |
| | KGLEWVSYISSSGS | AAGGGACTGGAATGGGTGTCCTACATCAGCAGCAGCGGCTCG |
| | TIYYADSVKGRFTI | ACCATCTACTACGCCGACAGCGTGAAGGGCCGGTTCACCATC |
| | SRDNAKNSLYLQMN | AGCCGGGACAACGCCAAGAACAGCCTGTACCTGCAGATGAAC |
| | SLRAEDTAVYYCAS | AGCCTGCGGGCCGAGGACACCGCCGTGTATTACTGTGCGAGT |
| | GWIRVPLRLPLFQH | GGGTGGATTCGTGTACCTTTACGATTGCCCCTCTTCCAGCAC |
| | WGQGTLVTVSSGGG | TGGGGCCAGGGCACCCTGGTCACCGTGTCCTCAGGCGGAGGT |
| | GSGGGGSGGGGSGG | GGAAGCGGAGGGGGAGGATCTGGCGGCGGAGGAAGCGGAGGC |
| | AIQLTQSPSSLSAS | GCCATCCAGCTGACCCAGAGCCCCAGCAGCCTGAGCGCCAGC |
| | VGDRVTITCRASQG | GTGGGCGATAGAGTGACCATCACCTGTCGCGCCAGCCAGGGC |
| | ISSALAWYQQKPGK | ATCAGCAGCGCTCTGGCCTGGTATCAGCAGAAGCCCGGCAAG |
| | APKLLIYDASSLES | GCCCCCAAGCTGCTGATCTACGACGCCAGCTCCCTGGAAAGC |
| | GVPSRFSGSGSGTD | GGCGTGCCCAGCAGATTCAGCGGCAGCGGCTCCGGCACCGAC |
| | FTLTISSLQPEDFA | TTCACCCTGACCATCAGCAGCCTGCAGCCCGAGGACTTCGCC |
| | TYYCQQFNSYPLTF | ACCTACTACTGCCAGCAGTTTAATAGTTACCCTCTCACTTTC |
| | GGGTKVEIK (SEQ | GGCGGCGGAACAAAGGTGGAGATCAAG (SEQ ID NO: |
| | ID NO: 193) | 406) |
| 41 | QVQLVESGGGLVKP | CAGGTGCAGCTGGTGGAAAGCGGCGGAGGCCTGGTGAAACCT |
| | GGSLRLSCAASGFT | GGCGGCAGCCTGAGACTGAGCTGCGCCGCCAGCGGCTTCACC |
| | FSDYYMSWIRQAPG | TTCAGCGACTACTACATGAGCTGGATCAGACAGGCCCCTGGC |
| | KGLEWVSYISSSGS | AAGGGACTGGAATGGGTGTCCTACATCAGCAGCAGCGGCTCG |
| | TIYYADSVKGRFTI | ACCATCTACTACGCCGACAGCGTGAAGGGCCGGTTCACCATC |
| | SRDNAKNSLYLQMN | AGCCGGGACAACGCCAAGAACAGCCTGTACCTGCAGATGAAC |
| | SLRAEDTAVYYCAR | AGCCTGCGGGCCGAGGACACCGCCGTGTATTACTGTGCGAGA |
| | VTIFAIFDIWGQGT | GTAACCATATTTGCGATATTTGATATCTGGGGCCAAGGGACA |
| | MVTVSSGGGGSGGG | ATGGTCACCGTGTCCTCAGGCGGAGGTGGAAGCGGAGGGGGA |
| | GSGGGGSGGAIQLT | GGATCTGGCGGCGGAGGAAGCGGAGGCGCCATCCAGCTGACC |
| | QSPSSLSASVGDRV | CAGAGCCCCAGCAGCCTGAGCGCCAGCGTGGGCGATAGAGTG |
| | TITCRASQGISSAL | ACCATCACCTGTCGCGCCAGCCAGGGCATCAGCAGCGCTCTG |
| | AWYQQKPGKAPKLL | GCCTGGTATCAGCAGAAGCCCGGCAAGGCCCCCAAGCTGCTG |
| | IYDASSLESGVPSR | ATCTACGACGCCAGCTCCCTGGAAAGCGGCGTGCCCAGCAGA |
| | FSGSGSGTDFTLTI | TTCAGCGGCAGCGGCTCCGGCACCGACTTCACCCTGACCATC |
| | SSLQPEDFATYYCQ | AGCAGCCTGCAGCCCGAGGACTTCGCCACCTACTACTGCCAG |
| | QFNSYPLTFGGGTK | CAGTTTAATAGTTACCCTCTCACTTTCGGCGGCGGAACAAAG |
| | VEIK (SEQ ID | GTGGAGATCAAG (SEQ ID NO: 407) |
| | NO: 194) | |
| 42 | QVQLVESGGGLVKP | CAGGTGCAGCTGGTGGAAAGCGGCGGAGGCCTGGTGAAACCT |
| | GGSLRLSCAASGFT | GGCGGCAGCCTGAGACTGAGCTGCGCCGCCAGCGGCTTCACC |
| | FSDYYMSWIRQAPG | TTCAGCGACTACTACATGAGCTGGATCAGACAGGCCCCTGGC |
| | KGLEWVSYISSSGS | AAGGGACTGGAATGGGTGTCCTACATCAGCAGCAGCGGCTCG |
| | TIYYADSVKGRFTI | ACCATCTACTACGCCGACAGCGTGAAGGGCCGGTTCACCATC |
| | SRDNAKNSLYLQMN | AGCCGGGACAACGCCAAGAACAGCCTGTACCTGCAGATGAAC |
| | SLRAEDTAVYYCAR | AGCCTGCGGGCCGAGGACACCGCCGTGTATTACTGTGCGAGA |
| | VGRGFVHFDLWGRG | GTGGGACGTGGATTCGTTCATTTTGATCTCTGGGGCCGTGGC |
| | TLVTVSSGGGGSGG | ACCCTGGTCACTGTGTCCTCAGGCGGAGGTGGAAGCGGAGGG |
| | GGSGGGGSGGAIQL | GGAGGATCTGGCGGCGGAGGAAGCGGAGGCGCCATCCAGCTG |
| | TQSPSSLSASVGDR | ACCCAGAGCCCCAGCAGCCTGAGCGCCAGCGTGGGCGATAGA |
| | VTITCRASQGISSA | GTGACCATCACCTGTCGCGCCAGCCAGGGCATCAGCAGCGCT |
| | LAWYQQKPGKAPKL | CTGGCCTGGTATCAGCAGAAGCCCGGCAAGGCCCCCAAGCTG |
| | LIYDASSLESGVPS | CTGATCTACGACGCCAGCTCCCTGGAAAGCGGCGTGCCCAGC |
| | RFSGSGSGTDFTLT | AGATTCAGCGGCAGCGGCTCCGGCACCGACTTCACCCTGACC |
| | ISSLQPEDFATYYC | ATCAGCAGCCTGCAGCCCGAGGACTTCGCCACCTACTACTGC |
| | QQFNSYPLTFGGGT | CAGCAGTTTAATAGTTACCCTCTCACTTTCGGCGGCGGAACA |
| | KVEIK (SEQ ID | AAGGTGGAGATCAAG (SEQ ID NO: 408) |
| | NO: 195) | |
| 43 | QVQLVESGGGLVKP | CAGGTGCAGCTGGTGGAAAGCGGCGGAGGCCTGGTGAAACCT |
| | GGSLRLSCAASGFT | GGCGGCAGCCTGAGACTGAGCTGCGCCGCCAGCGGCTTCACC |
| | FSDYYMSWIRQAPG | TTCAGCGACTACTACATGAGCTGGATCAGACAGGCCCCTGGC |
| | KGLEWVSYISSSGS | AAGGGACTGGAATGGGTGTCCTACATCAGCAGCAGCGGCTCG |
| | TIYYADSVKGRFTI | ACCATCTACTACGCCGACAGCGTGAAGGGCCGGTTCACCATC |
| | SRDNAKNSLYLQMN | AGCCGGGACAACGCCAAGAACAGCCTGTACCTGCAGATGAAC |
| | SLRAEDTAVYYCAR | AGCCTGCGGGCCGAGGACACCGCCGTGTATTACTGTGCGAGG |
| | TSRGLCVLFDYWGQ | ACGTCAAGAGGTTTGTGTGTTTTATTTGACTACTGGGGCCAG |
| | GTLVTVSSGGGGSG | GGAACCCTGGTCACCGTGTCCTCAGGCGGAGGTGGAAGCGGA |
| | GGGSGGGGSGGAIQ | GGGGGAGGATCTGGCGGCGGAGGAAGCGGAGGCGCCATCCAG |
| | LTQSPSSLSASVGD | CTGACCCAGAGCCCCAGCAGCCTGAGCGCCAGCGTGGGCGAT |
| | RVTITCRASQGISS | AGAGTGACCATCACCTGTCGCGCCAGCCAGGGCATCAGCAGC |
| | ALAWYQQKPGKAPK | GCTCTGGCCTGGTATCAGCAGAAGCCCGGCAAGGCCCCCAAG |
| | LLIYDASSLESGVP | CTGCTGATCTACGACGCCAGCTCCCTGGAAAGCGGCGTGCCC |
| | SRFSGSGSGTDFTL | AGCAGATTCAGCGGCAGCGGCTCCGGCACCGACTTCACCCTG |
| | TISSLQPEDFATYY | ACCATCAGCAGCCTGCAGCCCGAGGACTTCGCCACCTACTAC |
| | CQQFNSYPLTFGGG | TGCCAGCAGTTTAATAGTTACCCTCTCACTTTCGGCGGCGGA |
| | TKVEIK (SEQ ID | ACAAAGGTGGAGATCAAG (SEQ ID NO: 409) |
| | NO: 196) | |
| 44 | QVQLVESGGGLVKP | CAGGTGCAGCTGGTGGAAAGCGGCGGAGGCCTGGTGAAACCT |
| | GGSLRLSCAASGFT | GGCGGCAGCCTGAGACTGAGCTGCGCCGCCAGCGGCTTCACC |
| | FSDYYMSWIRQAPG | TTCAGCGACTACTACATGAGCTGGATCAGACAGGCCCCTGGC |
| | KGLEWVSYISSSGS | AAGGGACTGGAATGGGTGTCCTACATCAGCAGCAGCGGCTCG |
| | TIYYADSVKGRFTI | ACCATCTACTACGCCGACAGCGTGAAGGGCCGGTTCACCATC |
| | SRDNAKNSLYLQMN | AGCCGGGACAACGCCAAGAACAGCCTGTACCTGCAGATGAAC |
| | SLRAEDTAVYYCAR | AGCCTGCGGGCCGAGGACACCGCCGTGTATTACTGTGCGAGA |
| | SGPSSYWYFDLWGR | AGTGGGCCCAGTAGCTACTGGTACTTCGATCTCTGGGGCCGT |
| | GTLVTVSSGGGGSG | GGCACCCTGGTCACTGTGTCCTCAGGCGGAGGTGGAAGCGGA |
| | GGGSGGGGSGGAIQ | GGGGGAGGATCTGGCGGCGGAGGAAGCGGAGGCGCCATCCAG |
| | LTQSPSSLSASVGD | CTGACCCAGAGCCCCAGCAGCCTGAGCGCCAGCGTGGGCGAT |
| | RVTITCRASQGISS | AGAGTGACCATCACCTGTCGCGCCAGCCAGGGCATCAGCAGC |
| | ALAWYQQKPGKAPK | GCTCTGGCCTGGTATCAGCAGAAGCCCGGCAAGGCCCCCAAG |
| | LLIYDASSLESGVP | CTGCTGATCTACGACGCCAGCTCCCTGGAAAGCGGCGTGCCC |
| | SRFSGSGSGTDFTL | AGCAGATTCAGCGGCAGCGGCTCCGGCACCGACTTCACCCTG |
| | TISSLQPEDFATYY | ACCATCAGCAGCCTGCAGCCCGAGGACTTCGCCACCTACTAC |
| | CQQFNSYPLTFGGG | TGCCAGCAGTTTAATAGTTACCCTCTCACTTTCGGCGGCGGA |
| | TKVEIK (SEQ ID | ACAAAGGTGGAGATCAAG (SEQ ID NO: 410) |
| | NO: 197) | |
| 45 | QVQLVESGGGLVKP | CAGGTGCAGCTGGTGGAAAGCGGCGGAGGCCTGGTGAAACCT |
| | GGSLRLSCAASGFT | GGCGGCAGCCTGAGACTGAGCTGCGCCGCCAGCGGCTTCACC |
| | FSDYYMSWIRQAPG | TTCAGCGACTACTACATGAGCTGGATCAGACAGGCCCCTGGC |
| | KGLEWVSYISSSGS | AAGGGACTGGAATGGGTGTCCTACATCAGCAGCAGCGGCTCG |
| | TIYYADSVKGRFTI | ACCATCTACTACGCCGACAGCGTGAAGGGCCGGTTCACCATC |
| | SRDNAKNSLYLQMN | AGCCGGGACAACGCCAAGAACAGCCTGTACCTGCAGATGAAC |
| | SLRAEDTAVYYCAR | AGCCTGCGGGCCGAGGACACCGCCGTGTATTACTGTGCGAGA |
| | NIYMGGIWFDPWGQ | AACATTTACATGGGCGGGATCTGGTTCGACCCCTGGGGCCAG |
| | GTLVTVSSGGGGSG | GGAACCCTGGTCACCGTGTCCTCAGGCGGAGGTGGAAGCGGA |
| | GGGSGGGGSGGAIQ | GGGGGAGGATCTGGCGGCGGAGGAAGCGGAGGCGCCATCCAG |
| | LTQSPSSLSASVGD | CTGACCCAGAGCCCCAGCAGCCTGAGCGCCAGCGTGGGCGAT |
| | RVTITCRASQGISS | AGAGTGACCATCACCTGTCGCGCCAGCCAGGGCATCAGCAGC |
| | ALAWYQQKPGKAPK | GCTCTGGCCTGGTATCAGCAGAAGCCCGGCAAGGCCCCCAAG |
| | LLIYDASSLESGVP | CTGCTGATCTACGACGCCAGCTCCCTGGAAAGCGGCGTGCCC |
| | SRFSGSGSGTDFTL | AGCAGATTCAGCGGCAGCGGCTCCGGCACCGACTTCACCCTG |
| | TISSLQPEDFATYY | ACCATCAGCAGCCTGCAGCCCGAGGACTTCGCCACCTACTAC |
| | CQQFNSYPLTFGGG | TGCCAGCAGTTTAATAGTTACCCTCTCACTTTCGGCGGCGGA |
| | TKVEIK (SEQ ID | ACAAAGGTGGAGATCAAG (SEQ ID NO: 411) |
| | NO: 198) | |
| 46 | QVQLVESGGGLVKP | CAGGTGCAGCTGGTGGAAAGCGGCGGAGGCCTGGTGAAACCT |
| | GGSLRLSCAASGFT | GGCGGCAGCCTGAGACTGAGCTGCGCCGCCAGCGGCTTCACC |
| | FSDYYMSWIRQAPG | TTCAGCGACTACTACATGAGCTGGATCAGACAGGCCCCTGGC |
| | KGLEWVSYISSSGS | AAGGGACTGGAATGGGTGTCCTACATCAGCAGCAGCGGCTCG |
| | TIYYADSVKGRFTI | ACCATCTACTACGCCGACAGCGTGAAGGGCCGGTTCACCATC |
| | SRDNAKNSLYLQMN | AGCCGGGACAACGCCAAGAACAGCCTGTACCTGCAGATGAAC |
| | SLRAEDTAVYYCAR | AGCCTGCGGGCCGAGGACACCGCCGTGTATTACTGTGCGAGA |
| | LTVRTGAFDIWGQG | CTTACAGTCCGCACTGGAGCTTTTGATATCTGGGGCCAAGGG |
| | TMVTVSSGGGGSGG | ACAATGGTCACCGTGTCCTCAGGCGGAGGTGGAAGCGGAGGG |
| | GGSGGGGSGGAIQL | GGAGGATCTGGCGGCGGAGGAAGCGGAGGCGCCATCCAGCTG |
| | TQSPSSLSASVGDR | ACCCAGAGCCCCAGCAGCCTGAGCGCCAGCGTGGGCGATAGA |
| | VTITCRASQGISSA | GTGACCATCACCTGTCGCGCCAGCCAGGGCATCAGCAGCGCT |
| | LAWYQQKPGKAPKL | CTGGCCTGGTATCAGCAGAAGCCCGGCAAGGCCCCCAAGCTG |
| | LIYDASSLESGVPS | CTGATCTACGACGCCAGCTCCCTGGAAAGCGGCGTGCCCAGC |
| | RFSGSGSGTDFTLT | AGATTCAGCGGCAGCGGCTCCGGCACCGACTTCACCCTGACC |
| | ISSLQPEDFATYYC | ATCAGCAGCCTGCAGCCCGAGGACTTCGCCACCTACTACTGC |
| | QQFNSYPLTFGGGT | CAGCAGTTTAATAGTTACCCTCTCACTTTCGGCGGCGGAACA |
| | KVEIK (SEQ ID | AAGGTGGAGATCAAG (SEQ ID NO: 412) |
| | NO: 199) | |
| 47 | QVQLVESGGGLVKP | CAGGTGCAGCTGGTGGAAAGCGGCGGAGGCCTGGTGAAACCT |
| | GGSLRLSCAASGFT | GGCGGCAGCCTGAGACTGAGCTGCGCCGCCAGCGGCTTCACC |
| | FSDYYMSWIRQAPG | TTCAGCGACTACTACATGAGCTGGATCAGACAGGCCCCTGGC |
| | KGLEWVSYISSSGS | AAGGGACTGGAATGGGTGTCCTACATCAGCAGCAGCGGCTCG |
| | TIYYADSVKGRFTI | ACCATCTACTACGCCGACAGCGTGAAGGGCCGGTTCACCATC |
| | SRDNAKNSLYLQMN | AGCCGGGACAACGCCAAGAACAGCCTGTACCTGCAGATGAAC |
| | SLRAEDTAVYYCAR | AGCCTGCGGGCCGAGGACACCGCCGTGTATTACTGTGCGAGA |
| | LRTAHLDFDLWGRG | CTAAGAACTGCCCACCTGGACTTCGATCTCTGGGGCCGTGGC |
| | TLVTVSSGGGGSGG | ACCCTGGTCACTGTGTCCTCAGGCGGAGGTGGAAGCGGAGGG |
| | GGSGGGGSGGAIQL | GGAGGATCTGGCGGCGGAGGAAGCGGAGGCGCCATCCAGCTG |
| | TQSPSSLSASVGDR | ACCCAGAGCCCCAGCAGCCTGAGCGCCAGCGTGGGCGATAGA |
| | VTITCRASQGISSA | GTGACCATCACCTGTCGCGCCAGCCAGGGCATCAGCAGCGCT |
| | LAWYQQKPGKAPKL | CTGGCCTGGTATCAGCAGAAGCCCGGCAAGGCCCCCAAGCTG |
| | LIYDASSLESGVPS | CTGATCTACGACGCCAGCTCCCTGGAAAGCGGCGTGCCCAGC |
| | RFSGSGSGTDFTLT | AGATTCAGCGGCAGCGGCTCCGGCACCGACTTCACCCTGACC |
| | ISSLQPEDFATYYC | ATCAGCAGCCTGCAGCCCGAGGACTTCGCCACCTACTACTGC |
| | QQFNSYPLTFGGGT | CAGCAGTTTAATAGTTACCCTCTCACTTTCGGCGGCGGAACA |
| | KVEIK (SEQ ID | AAGGTGGAGATCAAG (SEQ ID NO: 413) |
| | NO: 200) | |
| 48 | QVQLVESGGGLVKP | CAGGTGCAGCTGGTGGAAAGCGGCGGAGGCCTGGTGAAACCT |
| | GGSLRLSCAASGFT | GGCGGCAGCCTGAGACTGAGCTGCGCCGCCAGCGGCTTCACC |
| | FSDYYMSWIRQAPG | TTCAGCGACTACTACATGAGCTGGATCAGACAGGCCCCTGGC |
| | KGLEWVSYISSSGS | AAGGGACTGGAATGGGTGTCCTACATCAGCAGCAGCGGCTCG |
| | TIYYADSVKGRFTI | ACCATCTACTACGCCGACAGCGTGAAGGGCCGGTTCACCATC |
| | SRDNAKNSLYLQMN | AGCCGGGACAACGCCAAGAACAGCCTGTACCTGCAGATGAAC |
| | SLRAEDTAVYYCAR | AGCCTGCGGGCCGAGGACACCGCCGTGTATTACTGTGCGAGA |
| | DLIFPVVFDYWGQG | GATCTCATATTTCCAGTAGTCTTTGACTACTGGGGCCAGGGA |
| | TLVTVSSGGGGSGG | ACCCTGGTCACCGTGTCCTCAGGCGGAGGTGGAAGCGGAGGG |
| | GGSGGGGSGGAIQL | GGAGGATCTGGCGGCGGAGGAAGCGGAGGCGCCATCCAGCTG |
| | TQSPSSLSASVGDR | ACCCAGAGCCCCAGCAGCCTGAGCGCCAGCGTGGGCGATAGA |
| | VTITCRASQGISSA | GTGACCATCACCTGTCGCGCCAGCCAGGGCATCAGCAGCGCT |
| | LAWYQQKPGKAPKL | CTGGCCTGGTATCAGCAGAAGCCCGGCAAGGCCCCCAAGCTG |
| | LIYDASSLESGVPS | CTGATCTACGACGCCAGCTCCCTGGAAAGCGGCGTGCCCAGC |
| | RFSGSGSGTDFTLT | AGATTCAGCGGCAGCGGCTCCGGCACCGACTTCACCCTGACC |
| | ISSLQPEDFATYYC | ATCAGCAGCCTGCAGCCCGAGGACTTCGCCACCTACTACTGC |
| | QQFNSYPLTFGGGT | CAGCAGTTTAATAGTTACCCTCTCACTTTCGGCGGCGGAACA |
| | KVEIK (SEQ ID | AAGGTGGAGATCAAG (SEQ ID NO: 414) |
| | NO: 201) | |
| 49 | QVQLVESGGGLVKP | CAGGTGCAGCTGGTGGAAAGCGGCGGAGGCCTGGTGAAACCT |
| | GGSLRLSCAASGFT | GGCGGCAGCCTGAGACTGAGCTGCGCCGCCAGCGGCTTCACC |
| | FSDYYMSWIRQAPG | TTCAGCGACTACTACATGAGCTGGATCAGACAGGCCCCTGGC |
| | KGLEWVSYISSSGS | AAGGGACTGGAATGGGTGTCCTACATCAGCAGCAGCGGCTCG |
| | TIYYADSVKGRFTI | ACCATCTACTACGCCGACAGCGTGAAGGGCCGGTTCACCATC |
| | SRDNAKNSLYLQMN | AGCCGGGACAACGCCAAGAACAGCCTGTACCTGCAGATGAAC |
| | SLRAEDTAVYYCAR | AGCCTGCGGGCCGAGGACACCGCCGTGTATTACTGTGCGAGA |
| | DGYRKYGYVFFDIW | GATGGATATCGCAAATATGGTTACGTATTTTTTGATATCTGG |
| | GQGTMVTVSSGGGG | GGCCAAGGGACAATGGTCACCGTGTCCTCAGGCGGAGGTGGA |
| | SGGGGSGGGGSGGA | AGCGGAGGGGGAGGATCTGGCGGCGGAGGAAGCGGAGGCGCC |
| | IQLTQSPSSLSASV | ATCCAGCTGACCCAGAGCCCCAGCAGCCTGAGCGCCAGCGTG |
| | GDRVTITCRASQGI | GGCGATAGAGTGACCATCACCTGTCGCGCCAGCCAGGGCATC |
| | SSALAWYQQKPGKA | AGCAGCGCTCTGGCCTGGTATCAGCAGAAGCCCGGCAAGGCC |
| | PKLLIYDASSLESG | CCCAAGCTGCTGATCTACGACGCCAGCTCCCTGGAAAGCGGC |
| | VPSRFSGSGSGTDF | GTGCCCAGCAGATTCAGCGGCAGCGGCTCCGGCACCGACTTC |
| | TLTISSLQPEDFAT | ACCCTGACCATCAGCAGCCTGCAGCCCGAGGACTTCGCCACC |
| | YYCQQFNSYPLTFG | TACTACTGCCAGCAGTTTAATAGTTACCCTCTCACTTTCGGC |
| | GGTKVEIK (SEQ | GGCGGAACAAAGGTGGAGATCAAG (SEQ ID NO: 415) |
| | ID NO: 202) | |
| 50 | QVQLVESGGGLVKP | CAGGTGCAGCTGGTGGAAAGCGGCGGAGGCCTGGTGAAACCT |
| | GGSLRLSCAASGFT | GGCGGCAGCCTGAGACTGAGCTGCGCCGCCAGCGGCTTCACC |
| | FSDYYMSWIRQAPG | TTCAGCGACTACTACATGAGCTGGATCAGACAGGCCCCTGGC |
| | KGLEWVSYISSSGS | AAGGGACTGGAATGGGTGTCCTACATCAGCAGCAGCGGCTCG |
| | TIYYADSVKGRFTI | ACCATCTACTACGCCGACAGCGTGAAGGGCCGGTTCACCATC |
| | SRDNAKNSLYLQMN | AGCCGGGACAACGCCAAGAACAGCCTGTACCTGCAGATGAAC |
| | SLRAEDTAVYYCAR | AGCCTGCGGGCCGAGGACACCGCCGTGTATTACTGTGCGAGA |
| | DGRYRRFWHAFDIW | GATGGGAGGTACAGGCGGTTCTGGCATGCTTTTGATATCTGG |
| | GQGTMVTVSSGGGG | GGCCAAGGGACAATGGTCACCGTGTCCTCAGGCGGAGGTGGA |
| | SGGGGSGGGGSGGA | AGCGGAGGGGGAGGATCTGGCGGCGGAGGAAGCGGAGGCGCC |
| | IQLTQSPSSLSASV | ATCCAGCTGACCCAGAGCCCCAGCAGCCTGAGCGCCAGCGTG |
| | GDRVTITCRASQGI | GGCGATAGAGTGACCATCACCTGTCGCGCCAGCCAGGGCATC |
| | SSALAWYQQKPGKA | AGCAGCGCTCTGGCCTGGTATCAGCAGAAGCCCGGCAAGGCC |
| | PKLLIYDASSLESG | CCCAAGCTGCTGATCTACGACGCCAGCTCCCTGGAAAGCGGC |
| | VPSRFSGSGSGTDF | GTGCCCAGCAGATTCAGCGGCAGCGGCTCCGGCACCGACTTC |
| | TLTISSLQPEDFAT | ACCCTGACCATCAGCAGCCTGCAGCCCGAGGACTTCGCCACC |
| | YYCQQFNSYPLTFG | TACTACTGCCAGCAGTTTAATAGTTACCCTCTCACTTTCGGC |
| | GGTKVEIK (SEQ | GGCGGAACAAAGGTGGAGATCAAG (SEQ ID NO: 416) |
| | ID NO: 203) | |
| 51 | QVQLVESGGGLVKP | CAGGTGCAGCTGGTGGAAAGCGGCGGAGGCCTGGTGAAACCT |
| | GGSLRLSCAASGFT | GGCGGCAGCCTGAGACTGAGCTGCGCCGCCAGCGGCTTCACC |
| | FSDYYMSWIRQAPG | TTCAGCGACTACTACATGAGCTGGATCAGACAGGCCCCTGGC |
| | KGLEWVSYISSSGS | AAGGGACTGGAATGGGTGTCCTACATCAGCAGCAGCGGCTCG |
| | TIYYADSVKGRFTI | ACCATCTACTACGCCGACAGCGTGAAGGGCCGGTTCACCATC |
| | SRDNAKNSLYLQMN | AGCCGGGACAACGCCAAGAACAGCCTGTACCTGCAGATGAAC |
| | SLRAEDTAVYYCAR | AGCCTGCGGGCCGAGGACACCGCCGTGTATTACTGTGCGAGA |
| | AHIRGYFDLWGRGT | GCCCATATACGGGGGTACTTCGATCTCTGGGGCCGTGGCACC |
| | LVTVSSGGGGSGGG | CTGGTCACTGTGTCCTCAGGCGGAGGTGGAAGCGGAGGGGGA |
| | GSGGGGSGGAIQLT | GGATCTGGCGGCGGAGGAAGCGGAGGCGCCATCCAGCTGACC |
| | QSPSSLSASVGDRV | CAGAGCCCCAGCAGCCTGAGCGCCAGCGTGGGCGATAGAGTG |
| | TITCRASQGISSAL | ACCATCACCTGTCGCGCCAGCCAGGGCATCAGCAGCGCTCTG |
| | AWYQQKPGKAPKLL | GCCTGGTATCAGCAGAAGCCCGGCAAGGCCCCCAAGCTGCTG |
| | IYDASSLESGVPSR | ATCTACGACGCCAGCTCCCTGGAAAGCGGCGTGCCCAGCAGA |
| | FSGSGSGTDFTLTI | TTCAGCGGCAGCGGCTCCGGCACCGACTTCACCCTGACCATC |
| | SSLQPEDFATYYCQ | AGCAGCCTGCAGCCCGAGGACTTCGCCACCTACTACTGCCAG |
| | QFNSYPLTFGGGTK | CAGTTTAATAGTTACCCTCTCACTTTCGGCGGCGGAACAAAG |
| | VEIK (SEQ ID | GTGGAGATCAAG (SEQ ID NO: 417) |
| | NO: 204) | |
| 52 | EVQLLESGGGLVQP | GAAGTGCAGCTGCTGGAAAGCGGCGGAGGCCTGGTGCAGCCT |
| | GGSLRLSCAASGFT | GGCGGCAGCCTGAGACTGTCTTGCGCCGCCAGCGGCTTCACC |
| | FSSYAMSWVRQAPG | TTCAGCAGCTACGCCATGAGCTGGGTCCGCCAGGCCCCTGGC |
| | KGLEWVSAISGSGG | AAGGGACTCGAATGGGTGTCCGCCATCAGCGGCAGCGGCGGC |
| | STYYADSVKGRFTI | AGCACCTACTACGCCGACAGCGTGAAGGGCCGGTTCACCATC |
| | SRDNSKNTLYLQMN | AGCCGGGACAACAGCAAGAACACCCTGTACCTGCAGATGAAC |
| | SLRAEDTAVYYCAT | AGCCTGCGGGCCGAGGACACCGCCGTATATTACTGTGCGACG |
| | WMGGGGRWYFDLWG | TGGATGGGGGGCGGGGGACGATGGTACTTCGATCTCTGGGGC |
| | RGTLVTVSSGGGGS | CGTGGCACCCTGGTCACTGTGTCCTCAGGCGGAGGTGGAAGC |
| | GGGGSGGGGSGGAI | GGAGGGGGAGGATCTGGCGGCGGAGGAAGCGGAGGCGCCATC |
| | QLTQSPSSLSASVG | CAGCTGACCCAGAGCCCCAGCAGCCTGAGCGCCAGCGTGGGC |
| | DRVTITCRASQGIS | GACAGAGTGACCATCACCTGTCGGGCCAGCCAGGGCATCAGC |
| | SALAWYQQKPGKAP | AGCGCTCTGGCCTGGTATCAGCAGAAGCCCGGCAAGGCCCCC |
| | KLLIYDASSLESGV | AAGCTGCTGATCTACGACGCGTCCTCCCTGGAAAGCGGCGTG |
| | PSRFSGSGSGTDFT | CCCAGCAGATTCAGCGGCAGCGGCTCCGGCACCGACTTCACC |
| | LTISSLQPEDFATY | CTGACCATCAGCAGCCTGCAGCCCGAGGACTTCGCCACCTAC |
| | YCQQFNNYPLTFGG | TACTGCCAGCAGTTTAATAATTACCCTCTCACTTTCGGCGGC |
| | GTKVEIK (SEQ | GGAACAAAGGTGGAGATCAAG (SEQ ID NO: 418) |
| | ID NO: 205) | |
| 53 | EVQLLESGGGLVQP | GAAGTGCAGCTGCTGGAAAGCGGCGGAGGCCTGGTGCAGCCT |
| | GGSLRLSCAASGFT | GGCGGCAGCCTGAGACTGTCTTGCGCCGCCAGCGGCTTCACC |
| | FSSYAMSWVRQAPG | TTCAGCAGCTACGCCATGAGCTGGGTCCGCCAGGCCCCTGGC |
| | KGLEWVSAISGSGG | AAGGGACTCGAATGGGTGTCCGCCATCAGCGGCAGCGGCGGC |
| | STYYADSVKGRFTI | AGCACCTACTACGCCGACAGCGTGAAGGGCCGGTTCACCATC |
| | SRDNSKNTLYLQMN | AGCCGGGACAACAGCAAGAACACCCTGTACCTGCAGATGAAC |
| | SLRAEDTAVYYCAR | AGCCTGCGGGCCGAGGACACCGCCGTATATTACTGTGCGAGA |
| | TSRTTWYFDLWGRG | ACTAGTCGTACAACCTGGTACTTCGATCTCTGGGGCCGTGGC |
| | TLVTVSSGGGGSGG | ACCCTGGTCACTGTGTCCTCAGGCGGAGGTGGAAGCGGAGGG |
| | GGSGGGGSGGAIQL | GGAGGATCTGGCGGCGGAGGAAGCGGAGGCGCCATCCAGCTG |
| | TQSPSSLSASVGDR | ACCCAGAGCCCCAGCAGCCTGAGCGCCAGCGTGGGCGACAGA |
| | VTITCRASQGISSA | GTGACCATCACCTGTCGGGCCAGCCAGGGCATCAGCAGCGCT |
| | LAWYQQKPGKAPKL | CTGGCCTGGTATCAGCAGAAGCCCGGCAAGGCCCCCAAGCTG |
| | LIYDASSLESGVPS | CTGATCTACGACGCGTCCTCCCTGGAAAGCGGCGTGCCCAGC |
| | RFSGSGSGTDFTLT | AGATTCAGCGGCAGCGGCTCCGGCACCGACTTCACCCTGACC |
| | ISSLQPEDFATYYC | ATCAGCAGCCTGCAGCCCGAGGACTTCGCCACCTACTACTGC |
| | QQFNNYPLTFGGGT | CAGCAGTTTAATAATTACCCTCTCACTTTCGGCGGCGGAACA |
| | KVEIK (SEQ ID | AAGGTGGAGATCAAG (SEQ ID NO: 419) |
| | NO: 206) | |
| 54 | EVQLLESGGGLVQP | GAAGTGCAGCTGCTGGAAAGCGGCGGAGGCCTGGTGCAGCCT |
| | GGSLRLSCAASGFT | GGCGGCAGCCTGAGACTGTCTTGCGCCGCCAGCGGCTTCACC |
| | FSSYAMSWVRQAPG | TTCAGCAGCTACGCCATGAGCTGGGTCCGCCAGGCCCCTGGC |
| | KGLEWVSAISGSGG | AAGGGACTCGAATGGGTGTCCGCCATCAGCGGCAGCGGCGGC |
| | STYYADSVKGRFTI | AGCACCTACTACGCCGACAGCGTGAAGGGCCGGTTCACCATC |
| | SRDNSKNTLYLQMN | AGCCGGGACAACAGCAAGAACACCCTGTACCTGCAGATGAAC |
| | SLRAEDTAVYYCAK | AGCCTGCGGGCCGAGGACACCGCCGTATATTACTGTGCGAAA |
| | WMGGGGRLYFDLWG | TGGATGGGGGGCGGGGGACGATTATACTTCGATCTCTGGGGC |
| | RGTLVTVSSGGGGS | CGTGGCACCCTGGTCACTGTGTCCTCAGGCGGAGGTGGAAGC |
| | GGGGSGGGGSGGAI | GGAGGGGGAGGATCTGGCGGCGGAGGAAGCGGAGGCGCCATC |
| | QLTQSPSSLSASVG | CAGCTGACCCAGAGCCCCAGCAGCCTGAGCGCCAGCGTGGGC |
| | DRVTITCRASQGIS | GACAGAGTGACCATCACCTGTCGGGCCAGCCAGGGCATCAGC |
| | SALAWYQQKPGKAP | AGCGCTCTGGCCTGGTATCAGCAGAAGCCCGGCAAGGCCCCC |
| | KLLIYDASSLESGV | AAGCTGCTGATCTACGACGCGTCCTCCCTGGAAAGCGGCGTG |
| | PSRFSGSGSGTDFT | CCCAGCAGATTCAGCGGCAGCGGCTCCGGCACCGACTTCACC |
| | LTISSLQPEDFATY | CTGACCATCAGCAGCCTGCAGCCCGAGGACTTCGCCACCTAC |
| | YCQQFNNYPLTFGG | TACTGCCAGCAGTTTAATAATTACCCTCTCACTTTCGGCGGC |
| | GTKVEIK (SEQ | GGAACAAAGGTGGAGATCAAG (SEQ ID NO: 420) |
| | ID NO: 207) | |
| 55 | EVQLLESGGGLVQP | GAAGTGCAGCTGCTGGAAAGCGGCGGAGGCCTGGTGCAGCCT |
| | GGSLRLSCAASGFT | GGCGGCAGCCTGAGACTGTCTTGCGCCGCCAGCGGCTTCACC |
| | FSSYAMSWVRQAPG | TTCAGCAGCTACGCCATGAGCTGGGTCCGCCAGGCCCCTGGC |
| | KGLEWVSAISGSGG | AAGGGACTCGAATGGGTGTCCGCCATCAGCGGCAGCGGCGGC |
| | STYYADSVKGRFTI | AGCACCTACTACGCCGACAGCGTGAAGGGCCGGTTCACCATC |
| | SRDNSKNTLYLQMN | AGCCGGGACAACAGCAAGAACACCCTGTACCTGCAGATGAAC |
| | SLRAEDTAVYYCAK | AGCCTGCGGGCCGAGGACACCGCCGTATATTACTGTGCGAAA |
| | WGGRLYWYFDLWGR | TGGGGGGGGCGGTTGTACTGGTACTTCGATCTCTGGGGCCGT |
| | GTLVTVSSGGGGSG | GGCACCCTGGTCACTGTGTCCTCAGGCGGAGGTGGAAGCGGA |
| | GGGSGGGGSGGAIQ | GGGGGAGGATCTGGCGGCGGAGGAAGCGGAGGCGCCATCCAG |
| | LTQSPSSLSASVGD | CTGACCCAGAGCCCCAGCAGCCTGAGCGCCAGCGTGGGCGAC |
| | RVTITCRASQGISS | AGAGTGACCATCACCTGTCGGGCCAGCCAGGGCATCAGCAGC |
| | ALAWYQQKPGKAPK | GCTCTGGCCTGGTATCAGCAGAAGCCCGGCAAGGCCCCCAAG |
| | LLIYDASSLESGVP | CTGCTGATCTACGACGCGTCCTCCCTGGAAAGCGGCGTGCCC |
| | SRFSGSGSGTDFTL | AGCAGATTCAGCGGCAGCGGCTCCGGCACCGACTTCACCCTG |
| | TISSLQPEDFATYY | ACCATCAGCAGCCTGCAGCCCGAGGACTTCGCCACCTACTAC |
| | CQQFNNYPLTFGGG | TGCCAGCAGTTTAATAATTACCCTCTCACTTTCGGCGGCGGA |
| | TKVEIK (SEQ ID | ACAAAGGTGGAGATCAAG (SEQ ID NO: 421) |
| | NO: 208) | |
| 56 | EVQLLESGGGLVQP | GAAGTGCAGCTGCTGGAAAGCGGCGGAGGCCTGGTGCAGCCT |
| | GGSLRLSCAASGFT | GGCGGCAGCCTGAGACTGTCTTGCGCCGCCAGCGGCTTCACC |
| | FSSYAMSWVRQAPG | TTCAGCAGCTACGCCATGAGCTGGGTCCGCCAGGCCCCTGGC |
| | KGLEWVSAISGSGG | AAGGGACTCGAATGGGTGTCCGCCATCAGCGGCAGCGGCGGC |
| | STYYADSVKGRFTI | AGCACCTACTACGCCGACAGCGTGAAGGGCCGGTTCACCATC |
| | SRDNSKNTLYLQMN | AGCCGGGACAACAGCAAGAACACCCTGTACCTGCAGATGAAC |
| | SLRAEDTAVYYCAK | AGCCTGCGGGCCGAGGACACCGCCGTATATTACTGTGCGAAA |
| | VIRQLWYFDLWGRG | GTTATTCGGCAACTCTGGTACTTCGATCTCTGGGGCCGTGGC |
| | TLVTVSSGGGGSGG | ACCCTGGTCACTGTGTCCTCAGGCGGAGGTGGAAGCGGAGGG |
| | GGSGGGGSGGAIQL | GGAGGATCTGGCGGCGGAGGAAGCGGAGGCGCCATCCAGCTG |
| | TQSPSSLSASVGDR | ACCCAGAGCCCCAGCAGCCTGAGCGCCAGCGTGGGCGACAGA |
| | VTITCRASQGISSA | GTGACCATCACCTGTCGGGCCAGCCAGGGCATCAGCAGCGCT |
| | LAWYQQKPGKAPKL | CTGGCCTGGTATCAGCAGAAGCCCGGCAAGGCCCCCAAGCTG |
| | LIYDASSLESGVPS | CTGATCTACGACGCGTCCTCCCTGGAAAGCGGCGTGCCCAGC |
| | RFSGSGSGTDFTLT | AGATTCAGCGGCAGCGGCTCCGGCACCGACTTCACCCTGACC |
| | ISSLQPEDFATYYC | ATCAGCAGCCTGCAGCCCGAGGACTTCGCCACCTACTACTGC |
| | QQFNNYPLTFGGGT | CAGCAGTTTAATAATTACCCTCTCALTTTCGGCGGCGGAACA |
| | KVEIK (SEQ ID | AAGGTGGAGATCAAG (SEQ ID NO: 422) |
| | NO: 209) | |
| 57 | EVQLLESGGGLVQP | GAAGTGCAGCTGCTGGAAAGCGGCGGAGGCCTGGTGCAGCCT |
| | GGSLRLSCAASGFT | GGCGGCAGCCTGAGACTGTCTTGCGCCGCCAGCGGCTTCACC |
| | FSSYAMSWVRQAPG | TTCAGCAGCTACGCCATGAGCTGGGTCCGCCAGGCCCCTGGC |
| | KGLEWVSAISGSGG | AAGGGACTCGAATGGGTGTCCGCCATCAGCGGCAGCGGCGGC |
| | STYYADSVKGRFTI | AGCACCTACTACGCCGACAGCGTGAAGGGCCGGTTCACCATC |
| | SRDNSKNTLYLQMN | AGCCGGGACAACAGCAAGAACACCCTGTACCTGCAGATGAAC |
| | SLRAEDTAVYYCAK | AGCCTGCGGGCCGAGGACACCGCCGTATATTACTGTGCGAAA |
| | VFANSWYFDLWGRG | GTTTTCGCCAACTCCTGGTACTTCGATCTCTGGGGCCGTGGC |
| | TLVTVSSGGGGSGG | ACCCTGGTCACTGTGTCCTCAGGCGGAGGTGGAAGCGGAGGG |
| | GGSGGGGSGGAIQL | GGAGGATCTGGCGGCGGAGGAAGCGGAGGCGCCATCCAGCTG |
| | TQSPSSLSASVGDR | ACCCAGAGCCCCAGCAGCCTGAGCGCCAGCGTGGGCGACAGA |
| | VTITCRASQGISSA | GTGACCATCACCTGTCGGGCCAGCCAGGGCATCAGCAGCGCT |
| | LAWYQQKPGKAPKL | CTGGCCTGGTATCAGCAGAAGCCCGGCAAGGCCCCCAAGCTG |
| | LIYDASSLESGVPS | CTGATCTACGACGCGTCCTCCCTGGAAAGCGGCGTGCCCAGC |
| | RFSGSGSGTDFTLT | AGATTCAGCGGCAGCGGCTCCGGCACCGACTTCACCCTGACC |
| | ISSLQPEDFATYYC | ATCAGCAGCCTGCAGCCCGAGGACTTCGCCACCTACTACTGC |
| | QQFNNYPLTFGGGT | CAGCAGTTTAATAATTACCCTCTCACTTTCGGCGGCGGAACA |
| | KVEIK (SEQ ID | AAGGTGGAGATCAAG (SEQ ID NO: 423) |
| | NO: 210) | |
| 58 | EVQLLESGGGLVQP | GAAGTGCAGCTGCTGGAAAGCGGCGGAGGCCTGGTGCAGCCT |
| | GGSLRLSCAASGFT | GGCGGCAGCCTGAGACTGTCTTGCGCCGCCAGCGGCTTCACC |
| | FSSYAMSWVRQAPG | TTCAGCAGCTACGCCATGAGCTGGGTCCGCCAGGCCCCTGGC |
| | KGLEWVSAISGSGG | AAGGGACTCGAATGGGTGTCCGCCATCAGCGGCAGCGGCGGC |
| | STYYADSVKGRFTI | AGCACCTACTACGCCGACAGCGTGAAGGGCCGGTTCACCATC |
| | SRDNSKNTLYLQMN | AGCCGGGACAACAGCAAGAACACCCTGTACCTGCAGATGAAC |
| | SLRAEDTAVYYCAK | AGCCTGCGGGCCGAGGACACCGCCGTATATTACTGTGCGAAA |
| | VDRTTWYFDLWGRG | GTAGATAGGACTACCTGGTACTTCGATCTCTGGGGCCGTGGC |
| | TLVTVSSGGGGSGG | ACCCTGGTCACTGTGTCCTCAGGCGGAGGTGGAAGCGGAGGG |
| | GGSGGGGSGGAIQL | GGAGGATCTGGCGGCGGAGGAAGCGGAGGCGCCATCCAGCTG |
| | TQSPSSLSASVGDR | ACCCAGAGCCCCAGCAGCCTGAGCGCCAGCGTGGGCGACAGA |
| | VTITCRASQGISSA | GTGACCATCACCTGTCGGGCCAGCCAGGGCATCAGCAGCGCT |
| | LAWYQQKPGKAPKL | CTGGCCTGGTATCAGCAGAAGCCCGGCAAGGCCCCCAAGCTG |
| | LIYDASSLESGVPS | CTGATCTACGACGCGTCCTCCCTGGAAAGCGGCGTGCCCAGC |
| | RFSGSGSGTDFTLT | AGATTCAGCGGCAGCGGCTCCGGCACCGACTTCACCCTGACC |
| | ISSLQPEDFATYYC | ATCAGCAGCCTGCAGCCCGAGGACTTCGCCACCTACTACTGC |
| | QQFNNYPLTFGGGT | CAGCAGTTTAATAATTACCCTCTCACTTTCGGCGGCGGAACA |
| | KVEIK (SEQ ID | AAGGTGGAGATCAAG (SEQ ID NO: 424) |
| | NO: 211) | |
| 59 | EVQLLESGGGLVQP | GAAGTGCAGCTGCTGGAAAGCGGCGGAGGCCTGGTGCAGCCT |
| | GGSLRLSCAASGFT | GGCGGCAGCCTGAGACTGTCTTGCGCCGCCAGCGGCTTCACC |
| | FSSYAMSWVRQAPG | TTCAGCAGCTACGCCATGAGCTGGGTCCGCCAGGCCCCTGGC |
| | KGLEWVSAISGSGG | AAGGGACTCGAATGGGTGTCCGCCATCAGCGGCAGCGGCGGC |
| | STYYADSVKGRFTI | AGCACCTACTACGCCGACAGCGTGAAGGGCCGGTTCACCATC |
| | SRDNSKNTLYLQMN | AGCCGGGACAACAGCAAGAACACCCTGTACCTGCAGATGAAC |
| | SLRAEDTAVYYCAK | AGCCTGCGGGCCGAGGACACCGCCGTATATTACTGTGCGAAA |
| | RWGKDGPYWYFDLW | CGATGGGGTAAGGATGGTCCTTACTGGTACTTCGATCTCTGG |
| | GRGTLVTVSSGGGG | GGCCGTGGCACCCTGGTCACTGTGTCCTCAGGCGGAGGTGGA |
| | SGGGGSGGGGSGGA | AGCGGAGGGGGAGGATCTGGCGGCGGAGGAAGCGGAGGCGCC |
| | IQLTQSPSSLSASV | ATCCAGCTGACCCAGAGCCCCAGCAGCCTGAGCGCCAGCGTG |
| | GDRVTITCRASQGI | GGCGACAGAGTGACCATCACCTGTCGGGCCAGCCAGGGCATC |
| | SSALAWYQQKPGKA | AGCAGCGCTCTGGCCTGGTATCAGCAGAAGCCCGGCAAGGCC |
| | PKLLIYDASSLESG | CCCAAGCTGCTGATCTACGACGCGTCCTCCCTGGAAAGCGGC |
| | VPSRFSGSGSGTDF | GTGCCCAGCAGATTCAGCGGCAGCGGCTCCGGCACCGACTTC |
| | TLTISSLQPEDFAT | ACCCTGACCATCAGCAGCCTGCAGCCCGAGGACTTCGCCACC |
| | YYCQQFNNYPLTFG | TACTACTGCCAGCAGTTTAATAATTACCCTCTCACTTTCGGC |
| | GGTKVEIK (SEQ | GGCGGAACAAAGGTGGAGATCAAG (SEQ ID NO: 425) |
| | ID NO: 212) | |
| 60 | EVQLLESGGGLVQP | GAAGTGCAGCTGCTGGAAAGCGGCGGAGGCCTGGTGCAGCCT |
| | GGSLRLSCAASGFT | GGCGGCAGCCTGAGACTGTCTTGCGCCGCCAGCGGCTTCACC |
| | FSSYAMSWVRQAPG | TTCAGCAGCTACGCCATGAGCTGGGTCCGCCAGGCCCCTGGC |
| | KGLEWVSAISGSGG | AAGGGACTCGAATGGGTGTCCGCCATCAGCGGCAGCGGCGGC |
| | STYYADSVKGRFTI | AGCACCTACTACGCCGACAGCGTGAAGGGCCGGTTCACCATC |
| | SRDNSKNTLYLQMN | AGCCGGGACAACAGCAAGAACACCCTGTACCTGCAGATGAAC |
| | SLRAEDTAVYYCAK | AGCCTGCGGGCCGAGGACACCGCCGTATATTACTGTGCGAAA |
| | RRDSYGPYWYFDLW | AGAAGAGACAGTTATGGTCCTTACTGGTACTTCGATCTCTGG |
| | GRGTLVTVSSGGGG | GGCCGTGGCACCCTGGTCACTGTGTCCTCAGGCGGAGGTGGA |
| | SGGGGSGGGGSGGA | AGCGGAGGGGGAGGATCTGGCGGCGGAGGAAGCGGAGGCGCC |
| | IQLTQSPSSLSASV | ATCCAGCTGACCCAGAGCCCCAGCAGCCTGAGCGCCAGCGTG |
| | GDRVTITCRASQGI | GGCGACAGAGTGACCATCACCTGTCGGGCCAGCCAGGGCATC |
| | SSALAWYQQKPGKA | AGCAGCGCTCTGGCCTGGTATCAGCAGAAGCCCGGCAAGGCC |
| | PKLLIYDASSLESG | CCCAAGCTGCTGATCTACGACGCGTCCTCCCTGGAAAGCGGC |
| | VPSRFSGSGSGTDF | GTGCCCAGCAGATTCAGCGGCAGCGGCTCCGGCACCGACTTC |
| | TLTISSLQPEDFAT | ACCCTGACCATCAGCAGCCTGCAGCCCGAGGACTTCGCCACC |
| | YYCQQFNNYPLTFG | TACTACTGCCAGCAGTTTAATAATTACCCTCTCACTTTCGGC |
| | GGTKVEIK (SEQ | GGCGGAACAAAGGTGGAGATCAAG (SEQ ID NO: 426) |
| | ID NO: 213) | |
| 61 | EVQLLESGGGLVQP | GAAGTGCAGCTGCTGGAAAGCGGCGGAGGCCTGGTGCAGCCT |
| | GGSLRLSCAASGFT | GGCGGCAGCCTGAGACTGTCTTGCGCCGCCAGCGGCTTCACC |
| | FSSYAMSWVRQAPG | TTCAGCAGCTACGCCATGAGCTGGGTCCGCCAGGCCCCTGGC |
| | KGLEWVSAISGSGG | AAGGGACTCGAATGGGTGTCCGCCATCAGCGGCAGCGGCGGC |
| | STYYADSVKGRFTI | AGCACCTACTACGCCGACAGCGTGAAGGGCCGGTTCACCATC |
| | SRDNSKNTLYLQMN | AGCCGGGACAACAGCAAGAACACCCTGTACCTGCAGATGAAC |
| | SLRAEDTAVYYCAK | AGCCTGCGGGCCGAGGACACCGCCGTATATTACTGTGCGAAG |
| | NRPPPGYWYFDLWG | AATCGTCCCCCGCCCGGGTACTGGTACTTCGATCTCTGGGGC |
| | RGTLVTVSSGGGGS | CGTGGCACCCTGGTCACTGTGTCCTCAGGCGGAGGTGGAAGC |
| | GGGGSGGGGSGGAI | GGAGGGGGAGGATCTGGCGGCGGAGGAAGCGGAGGCGCCATC |
| | QLTQSPSSLSASVG | CAGCTGACCCAGAGCCCCAGCAGCCTGAGCGCCAGCGTGGGC |
| | DRVTITCRASQGIS | GACAGAGTGACCATCACCTGTCGGGCCAGCCAGGGCATCAGC |
| | SALAWYQQKPGKAP | AGCGCTCTGGCCTGGTATCAGCAGAAGCCCGGCAAGGCCCCC |
| | KLLIYDASSLESGV | AAGCTGCTGATCTACGACGCGTCCTCCCTGGAAAGCGGCGTG |
| | PSRFSGSGSGTDFT | CCCAGCAGATTCAGCGGCAGCGGCTCCGGCACCGACTTCACC |
| | LTISSLQPEDFATY | CTGACCATCAGCAGCCTGCAGCCCGAGGACTTCGCCACCTAC |
| | YCQQFNNYPLTFGG | TACTGCCAGCAGTTTAATAATTACCCTCTCACTTTCGGCGGC |
| | GTKVEIK (SEQ | GGAACAAAGGTGGAGATCAAG (SEQ ID NO: 427) |
| | ID NO: 214) | |
| 62 | EVQLLESGGGLVQP | GAAGTGCAGCTGCTGGAAAGCGGCGGAGGCCTGGTGCAGCCT |
| | GGSLRLSCAASGFT | GGCGGCAGCCTGAGACTGTCTTGCGCCGCCAGCGGCTTCACC |
| | FSSYAMSWVRQAPG | TTCAGCAGCTACGCCATGAGCTGGGTCCGCCAGGCCCCTGGC |
| | KGLEWVSAISGSGG | AAGGGACTCGAATGGGTGTCCGCCATCAGCGGCAGCGGCGGC |
| | STYYADSVKGRFTI | AGCACCTACTACGCCGACAGCGTGAAGGGCCGGTTCACCATC |
| | SRDNSKNTLYLQMN | AGCCGGGACAACAGCAAGAACACCCTGTACCTGCAGATGAAC |
| | SLRAEDTAVYYCAK | AGCCTGCGGGCCGAGGACACCGCCGTATATTACTGTGCGAAG |
| | GRRFSWYFDLWGRG | GGAAGACGATTTAGCTGGTACTTCGATCTCTGGGGCCGTGGC |
| | TLVTVSSGGGGSGG | ACCCTGGTCACTGTGTCCTCAGGCGGAGGTGGAAGCGGAGGG |
| | GGSGGGGSGGAIQL | GGAGGATCTGGCGGCGGAGGAAGCGGAGGCGCCATCCAGCTG |
| | TQSPSSLSASVGDR | ACCCAGAGCCCCAGCAGCCTGAGCGCCAGCGTGGGCGACAGA |
| | VTITCRASQGISSA | GTGACCATCACCTGTCGGGCCAGCCAGGGCATCAGCAGCGCT |
| | LAWYQQKPGKAPKL | CTGGCCTGGTATCAGCAGAAGCCCGGCAAGGCCCCCAAGCTG |
| | LIYDASSLESGVPS | CTGATCTACGACGCGTCCTCCCTGGAAAGCGGCGTGCCCAGC |
| | RFSGSGSGTDFTLT | AGATTCAGCGGCAGCGGCTCCGGCACCGACTTCACCCTGACC |
| | ISSLQPEDFATYYC | ATCAGCAGCCTGCAGCCCGAGGACTTCGCCACCTACTACTGC |
| | QQFNNYPLTFGGGT | CAGCAGTTTAATAATTACCCTCTCACTTTCGGCGGCGGAACA |
| | KVEIK (SEQ ID | AAGGTGGAGATCAAG (SEQ ID NO: 428) |
| | NO: 215) | |

[0176] In some embodiments, the extracellular ligand binding domain of the first receptor is an scFv. In some embodiments, the scFv domain binds to MSLN. In some embodiments, the scFv is the ligand binding domain of a CAR. Exemplary scFv domains specific to MSLN are shown in Table 1, supra. In Table 1, underlining indicates CDR sequences.

[0177] In some embodiments, the extracellular ligand binding domain of the first receptor comprises an antigen binding domain having at least 80% identity, at least 85% identity, at least 90% identity, at least 95% identity, at least 97% identity or at least 99% identity to a sequence of SEQ ID NOS: 3-6, 80 or 154-215, or a sequence as set forth in Table 1. In some embodiments, the extracellular ligand binding domain of the first receptor comprises an antigen binding domain comprising a sequence of SEQ ID NOS: 3-6, 80 or 154-215, as set forth in Table 1.

[0178] In some embodiments, the extracellular ligand binding domain of the first receptor comprises an binding domain having at least 80% identity, at least 85% identity, at least 90% identity, at least 95% identity, at least 97% identity or at least 99% identity to a sequence of SEQ ID NO: 171. In some embodiments, the extracellular ligand binding domain of the first receptor comprises an binding domain comprising a sequence of SEQ ID NO: 171.

[0179] In some embodiments, the extracellular ligand binding domain of the first receptor comprises an scFv antigen binding domain having at least 80% identity, at least 85% identity, at least 90% identity, at least 95% identity, at least 97% identity or at least 99% identity to any one of SEQ ID NOs: 3-6. In some embodiments, the extracellular ligand binding domain of the first receptor comprises an scFv antigen binding domain comprising a sequence of any one of SEQ ID NOs: 3-6 or 80. In some embodiments, the extracellular ligand binding domain of the first receptor consists essentially of a sequence selected from the group consisting of SEQ ID NOs: 3-6 or 80.

TABLE 2
Sequences of MSLN complementary determining regions (CDRs)

| # | HC CDR1 | HC CDR2 | HC CDR3 | LC |
|---|---|---|---|---|
| 1 | NAWMS | RIKSKTDGGTTDYAAP | DLPKLRNFHI (SEQ ID | A |
| | (SEQ ID | VKG (SEQ ID NO: 450) | NO: 471) | |
| | NO: 429) | | | |
| 2 | SYAMH | AISSNGGSTYYANSVK | LEYHGFRQYGLRYWH | A |
| | (SEQ ID | G (SEQ ID NO: 451) | (SEQ ID NO: 472) | |
| | NO: 430) | | | |
| 3 | SGGYSWS | YIYHSGSTYYNPSLKS | IKFWFAGINYFFP (SEQ | A |
| | (SEQ ID | (SEQ ID NO: 452) | ID NO: 473) | |
| | NO: 431) | | | |
| 4 | SYWMH | RINSDGSSTSYADSVKG | GFLGMGSNFI (SEQ ID | A |
| | (SEQ ID | (SEQ ID NO: 453) | NO: 474) | |
| | NO: 449) | | | |
| 5 | SGGYYWS | YIYYSGSTYYNPSLKS | GDRARYFDL (SEQ ID | A |
| | (SEQ ID | (SEQ ID NO: 454) | NO: 475) | |
| | NO: 432) | | | |
| 6 | SYWMH | RINSDGSSTSYADSVKG | YPRGYHQMVDAFDI | A |
| | (SEQ ID | (SEQ ID NO: 453) | (SEQ ID NO: 476) | |
| | NO: 449) | | | |
| 7 | SSSYYWG | SIYYSGSTYYNPSLKS | VRFLAARTTIPEANFL | A |
| | (SEQ ID | (SEQ ID NO: 455) | (SEQ ID NO: 477) | |
| | NO: 433) | | | |
| 8 | SYSMN | YISSSSSTIYYADSVKG | VLSRARFDY (SEQ ID | A |
| | (SEQ ID | (SEQ ID NO: 456) | NO: 478) | |
| | NO: 434) | | | |
| 9 | SYSMN | SISSSSSYIYYADSVKG | LRGRVFDP (SEQ ID | A |
| | (SEQ ID | (SEQ ID NO: 457) | NO: 479) | |
| | NO: 434) | | | |
| 10 | SSSYYWG | SIYYSGSTYYNPSLKS | IKFTSFLYVHGFL (SEQ | A |
| | (SEQ ID | (SEQ ID NO: 455) | ID NO: 480) | |
| | NO: 433) | | | |
| 11 | SYAMH | WINAGNGNTKYSQKFQ | GQRWLYLGGIRRH | A |
| | (SEQ ID | G(SEQ ID NO: 458) | (SEQ ID NO: 481) | |
| | NO: 430) | | | |
| 12 | SYYWS | YIYYSGSTNYNPSLKS | EWIPSRPYYFDY (SEQ | A |
| | (SEQ ID | (SEQ ID NO: 459) | ID NO: 482) | |
| | NO: 435) | | | |
| 13 | SGGYYWS | YIYYSGSTYYNPSLKS | ESTGTGAFDI (SEQ ID | A |
| | (SEQ ID | (SEQ ID NO: 454) | NO: 483) | |
| | NO: 432) | | | |
| 14 | DYGMS | GINWNGGSTGYADSVK | ERYRRVLHWYFDL | A |
| | (SEQ ID | G (SEQ ID NO: 460) | (SEQ ID NO: 484) | |
| | NO: 436) | | | |
| 15 | SYDIN | WMNPNSGNTGYAQKF | EPDAFDI (SEQ ID NO: | A |
| | (SEQ ID | QG (SEQ ID NO: 461) | 485) | |
| | NO: 437) | | | |
| 16 | SGGYYWS | YIYYSGSTYYNPSLKS | EHMGTIPYYFDY (SEQ | A |
| | (SEQ ID | (SEQ ID NO: 454) | ID NO: 486) | |
| | NO: 432) | | | |
| 17 | SGGYYWS | YIYYSGSTYYNPSLKS | EEFGYGDVLY (SEQ ID | A |
| | (SEQ ID | (SEQ ID NO: 454) | NO: 487) | |
| | NO: 432) | | | |
| 18 | SGDYYWS | YIYYSGSTYYNPSLKS | EDWKGAFDI (SEQ ID | A |
| | (SEQ ID | (SEQ ID NO: 454) | NO: 488) | |
| | NO: 438) | | | |
| 19 | SYSMN | YISSSSSTIYYADSVKG | EDFSHKLGYFQH (SEQ | A |
| | (SEQ ID | (SEQ ID NO: 456) | ID NO: 489) | |
| | NO: 434) | | | |
| 20 | DYYMS | YISSSGSTIYYADSVKG | DYDYV (SEQ ID NO: | A |
| | (SEQ ID | (SEQ ID NO: 462) | 490) | |
| | NO: 439) | | | |
| 21 | SGDYYWS | YIYYSGSTYYNPSLKS | DRRDWDWFDP (SEQ | A |
| | (SEQ ID | (SEQ ID NO: 454) | ID NO: 491) | |
| | NO: 438) | | | |
| 22 | SSNWWS | EIYHSGSTNYNPSLKS | DQQALKYRVD (SEQ | A |
| | (SEQ ID | (SEQ ID NO: 463) | ID NO: 492) | |
| | NO: 440) | | | |
| 23 | SYGIS | WISAYNGNTNYAQKLQ | DLTLGCFDY (SEQ ID | A |
| | (SEQ ID | G (SEQ ID NO: 464) | NO: 493) | |
| | NO: 441) | | | |
| 24 | SNYMS | VIYSGGSTYYADSVKG | DGSNSWYFDL (SEQ ID | A |
| | (SEQ ID | (SEQ ID NO: 465) | NO: 494) | |
| | NO: 442) | | | |
| 25 | SYGMH | VIWYDGSNKYYADSVK | AFLFLSFSV (SEQ ID | A |
| | (SEQ ID | G (SEQ ID NO: 466) | NO: 495) | |
| | NO: 443) | | | |
| 26 | DYTMH | LISWDGGSTYYADSVK | GIFYSSKEDFDY (SEQ | A |
| | (SEQ ID | G (SEQ ID NO: 467) | ID NO: 496) | |
| | NO: 444) | | | |
| 27 | DYTMH | LISWDGGSTYYADSVK | DIWIFYSSNPKPTVY | A |
| | (SEQ ID | G (SEQ ID NO: 467) | (SEQ ID NO: 497) | |
| | NO: 444) | | | |
| 28 | SYAMN | WINTNTGNPTYAQGFT | KDQTLTYGNWFDP | A |
| | (SEQ ID | G (SEQ ID NO: 468) | (SEQ ID NO: 498) | |
| | NO: 445) | | | |
| 29 | SGSYYWS | YIYYSGSTNYNPSLKS | DHYERGLY (SEQ ID | A |
| | (SEQ ID | (SEQ ID NO: 459) | NO: 499) | |
| | NO: 446) | | | |
| 30 | DYYMS | YISSSGSTIYYADSVKG | YMYNWYFDL (SEQ ID | B |
| | (SEQ ID | (SEQ ID NO: 462) | NO: 500) | |
| | NO: 439) | | | |
| 31 | DYYMS | YISSSGSTIYYADSVKG | DRRPAFDI (SEQ ID NO: | B |
| | (SEQ ID | (SEQ ID NO: 462) | 501) | |
| | NO: 439) | | | |
| 32 | DYYMS | YISSSGSTIYYADSVKG | HLKRRPYFDY (SEQ ID | C |
| | (SEQ ID | (SEQ ID NO: 462) | NO: 502) | |
| | NO: 439) | | | |
| 33 | DYYMS | YISSSGSTIYYADSVKG | VHKKPIFDY (SEQ ID | C |
| | (SEQ ID | (SEQ ID NO: 462) | NO: 503) | |
| | NO: 439) | | | |
| 34 | DYYMS | YISSSGSTIYYADSVKG | TSRRCTFQH (SEQ ID | C |
| | (SEQ ID | (SEQ ID NO: 462) | NO: 504) | |
| | NO: 439) | | | |
| 35 | DYYMS | YISSSGSTIYYADSVKG | TSPRPLFQH (SEQ ID | C |
| | (SEQ ID | (SEQ ID NO: 462) | NO: 505) | |
| | NO: 439) | | | |
| 36 | DYYMS | YISSSGSTIYYADSVKG | PYQVRGVYFDY (SEQ | C |
| | (SEQ ID | (SEQ ID NO: 462) | ID NO: 506) | |
| | NO: 439) | | | |
| 37 | DYYMS | YISSSGSTIYYADSVKG | PYKKRRTVFDY (SEQ | C |
| | (SEQ ID | (SEQ ID NO: 462) | ID NO: 507) | |
| | NO: 439) | | | |
| 38 | DYYMS | YISSSGSTIYYADSVKG | LQRGLALFQH (SEQ ID | C |
| | (SEQ ID | (SEQ ID NO: 462) | NO: 508) | |
| | NO: 439) | | | |
| 39 | DYYMS | YISSSGSTIYYADSVKG | ILSVPYFDL (SEQ ID | C |
| | (SEQ ID | (SEQ ID NO: 462) | NO: 509) | |
| | NO: 439) | | | |
| 40 | DYYMS | YISSSGSTIYYADSVKG | GWIRVPLRLPLFQH | C |
| | (SEQ ID | (SEQ ID NO: 462) | (SEQ ID NO: 510) | |
| | NO: 439) | | | |
| 41 | DYYMS | YISSSGSTIYYADSVKG | VTIFAIFDI | C |
| | (SEQ ID | (SEQ ID NO: 462) | (SEQ ID NO: 511) | |
| | NO: 439) | | | |
| 42 | DYYMS | YISSSGSTIYYADSVKG | VGRGFVHFDL (SEQ ID | C |
| | (SEQ ID | (SEQ ID NO: 462) | NO: 512) | |
| | NO: 439) | | | |
| 43 | DYYMS | YISSSGSTIYYADSVKG | TSRGLCVLFDY (SEQ | C |
| | (SEQ ID | (SEQ ID NO: 462) | ID NO: 513) | |
| | NO: 439) | | | |
| 44 | DYYMS | YISSSGSTIYYADSVKG | SGPSSYWYFDL (SEQ | C |
| | (SEQ ID | (SEQ ID NO: 462) | ID NO: 514) | |
| | NO: 439) | | | |
| 45 | DYYMS | YISSSGSTIYYADSVKG | NIYMGGIWFDP (SEQ | C |
| | (SEQ ID | (SEQ ID NO: 462) | ID NO: 515) | |
| | NO: 439) | | | |
| 46 | DYYMS | YISSSGSTIYYADSVKG | LTVRTGAFDI (SEQ ID | C |
| | (SEQ ID | (SEQ ID NO: 462) | NO: 516) | |
| | NO: 439) | | | |
| 47 | DYYMS | YISSSGSTIYYADSVKG | LRTAHLDFDL (SEQ ID | C |
| | (SEQ ID | (SEQ ID NO: 462) | NO: 517) | |
| | NO: 439) | | | |
| 48 | DYYMS | YISSSGSTIYYADSVKG | DLIFPWFDY (SEQ ID | C |
| | (SEQ ID | (SEQ ID NO: 462) | NO: 518) | |
| | NO: 439) | | | |
| 49 | DYYMS | YISSSGSTIYYADSVKG | DGYRKYGYVFFDI | C |
| | (SEQ ID | (SEQ ID NO: 462) | (SEQ ID NO: 519) | |
| | NO: 439) | | | |
| 50 | DYYMS | YISSSGSTIYYADSVKG | DGRYRRFWHAFDI | C |
| | (SEQ ID | (SEQ ID NO: 462) | (SEQ ID NO: 520) | |
| | NO: 439) | | | |
| 51 | DYYMS | YISSSGSTIYYADSVKG | AHIRGYFDL (SEQ ID | C |
| | (SEQ ID | (SEQ ID NO: 462) | NO: 521) | |
| | NO: 439) | | | |
| 52 | SYAMS | AISGSGGSTYYADSVK | WMGGGGRWYFDL | C |
| | (SEQ ID | G (SEQ ID NO: 469) | (SEQ ID NO: 522) | |
| | NO: 447) | | | |
| 53 | SYAMS | AISGSGGSTYYADSVK | TSRTTWYFDL (SEQ ID | C |
| | (SEQ ID | G (SEQ ID NO: 469) | NO: 523) | |
| | NO: 447) | | | |
| 54 | SYAMS | AISGSGGSTYYADSVK | WMGGGGRLYFDL | C |
| | (SEQ ID | G (SEQ ID NO: 469) | (SEQ ID NO: 524) | |
| | NO: 447) | | | |
| 55 | SYAMS | AISGSGGSTYYADSVK | WGGRLYWYFDL (SEQ | C |
| | (SEQ ID | G (SEQ ID NO: 469) | ID NO: 525) | |
| | NO: 447) | | | |
| 56 | SYAMS | AISGSGGSTYYADSVK | VIRQLWYFDL (SEQ ID | C |
| | (SEQ ID | G (SEQ ID NO: 469) | NO: 526) | |
| | NO: 447) | | | |
| 57 | SYAMS | AISGSGGSTYYADSVK | VFANSWYFDL (SEQ ID | C |
| | (SEQ ID | G (SEQ ID NO: 469) | NO: 527) | |
| | NO: 447) | | | |
| 58 | SYAMS | AISGSGGSTYYADSVK | VDRTTWYFDL (SEQ ID | C |
| | (SEQ ID | G (SEQ ID NO: 469) | NO: 528) | |
| | NO: 447) | | | |
| 59 | SYAMS | AISGSGGSTYYADSVK | RWGKDGPYWYFDL | C |
| | (SEQ ID | G (SEQ ID NO: 469) | (SEQ ID NO: 529) | |
| | NO: 447) | | | |
| 60 | SYAMS | AISGSGGSTYYADSVK | RRDSYGPYWYFDL | C |
| | (SEQ ID | G (SEQ ID NO: 469) | (SEQ ID NO: 530) | |
| | NO: 447) | | | |
| 61 | SYAMS | AISGSGGSTYYADSVK | NRPPPGYWYFDL (SEQ | C |
| | (SEQ ID | G (SEQ ID NO: 469) | ID NO: 531) | |
| | NO: 447) | | | |
| 62 | SYAMS | AISGSGGSTYYADSVK | GRRFSWYFDL (SEQ ID | C |
| | (SEQ ID | G (SEQ ID NO: 469) | NO: 532) | |
| | NO: 447) | | | |
| | SGDYYWS | YIYYSGSTYYNPSLKS | CAREDVVKGAFDIW | A |
| | (SEQ ID | (SEQ ID NO: 454) | (SEQ ID NO: 533) | |
| | NO: 438) | | | |
| | GYTMN | LITPYNGAS SYNQKFRG | GGYDGRGFDY (SEQ | D |
| | (SEQ ID | (SEQ ID NO: 470) | ID NO: 534) | |
| | NO: 448) | | | |
| Light chain CDRs | | | | |
| | LC CDR1 | LC CDR2 | LC CDR3 | |
| A | RASQSISS | AASSLQS (SEQ ID NO: | QQSYSTPLT (SEQ ID | |
| | YLN (SEQ | 539) | NO: 542) | |
| | ID NO: | | | |
| | 535) | | | |
| B | RASQGISS | AASSLQS (SEQ ID NO: | QQANSFPLT (SEQ ID | |
| | WLA (SEQ | 539) | NO: 543) | |
| | ID NO: | | | |
| | 536) | | | |
| C | RASQGISS | DASSLES (SEQ ID NO: | QQFNSYPLT (SEQ ID | |
| | ALA (SEQ | 540) | NO: 544) | |
| | ID NO: | | | |
| | 537) | | | |
| D | SASSSVSY | DTSKLAS (SEQ ID NO: | QQWSGYPLT (SEQ ID | |
| | MH (SEQ | 541) | NO: 545) | |
| | ID NO: | | | |
| | 538) | | | |

[0180] In Table 2, the light chain (LC) CDRs paired with the indicated heavy chain (HC) CDRs are indicated in the left column.

[0181] In some embodiments, the extracellular ligand binding domain of the first receptor comprises the HC CDR1, the HC CDR2, and the HC CDR3 set forth in Table 2 (e.g., the HC CDR 1, the HC CDR2, and the HC CDR 3 of line #1, line #2, line #3, etc. of Table 2) or sequences having at most 1, 2, or 3 substitutions, deletions, or insertion relative to the CDRs of Table 2. In some embodiments, the extracellular ligand binding domain of the first receptor comprises the LC CDR1, the LC CDR2, and the LC CDR3 set forth in Table 2 (e.g., the LC CDR 1, the LC CDR2, and the LC CDR 3 of line A, line B, or line C of Table 2) or sequences having at most 1, 2, or 3 substitutions, deletions, or insertion relative to the CDRs of Table 2. In some embodiments, the extracellular ligand binding domain of the first receptor comprises the HC CDR1, the HC CDR2, and the HC CDR3 set forth in Table 2 (e.g., the HC CDR 1, the HC CDR2, and the HC CDR 3 of line #1, line #2, line #3, etc. of Table 2). In some embodiments, the extracellular ligand binding domain of the first receptor comprises the LC CDR1, the LC CDR2, and the LC CDR3 set forth in Table 2 (e.g., the LC CDR 1, the LC CDR2, and the LC CDR 3 of line A, line B, or line C of Table 2).

[0182] In some embodiments, the extracellular ligand binding domain of the first receptor comprises the HC CDR1, HC CDR2, HC CDR3, LC CDR1, the LC CDR2, and the LC CDR3 set forth in Table 2 (e.g., the HC CDR1, HC CDR2 and HC CDR3 set forth in line 1, and the LC CDR 1, the LC CDR2, and the LC CDR 3 in line A) In some embodiments, the extracellular ligand binding domain of the first receptor comprises the HC CDR1, the HC CDR2, and the HC CDR3 set forth in Table 2 (e.g., the HC CDR 1, the HC CDR2, and the HC CDR 3 of line #1, line #2, line #3, etc. of Table 2) or sequences having at most 1, 2, or 3 substitutions, deletions, or insertion relative to the CDRs of Table 2. In some embodiments, the extracellular ligand binding domain of the first receptor comprises the LC CDR1, the LC CDR2, and the LC CDR3 set forth in Table 2 (e.g., the LC CDR 1, the LC CDR2, and the LC CDR 3 of line A, line B, or line C of Table 2) or sequences having at most 1, 2, or 3 substitutions, deletions, or insertion relative to the CDRs of Table 2. In some embodiments, an extracellular ligand binding domain of the first receptor comprises one or more HC CDRs set forth in Table 2 and one or more LC CDRs set forth in Table 2. In some embodiments, the extracellular ligand binding domain of the first receptor comprises (i) the HC CDR1, the HC CDR2, and the HC CDR3 set forth in one line of Table 2 (e.g., the HC CDR 1, the HC CDR2, and the HC CDR 3 of line #1, line #2, line #3, etc. of Table 2) and (ii) the LC CDR1, the LC CDR2, and the LC CDR3 set forth in one line of Table 2 (e.g., the LC CDR 1, the LC CDR2, and the LC CDR 3 of line A, line B, or line C of Table 2). In each case, the HC CDRs may be paired with any of the LC CDRs, as the heavy chains and light chains share similarity, with routine testing to confirm desired expression and binding activity; however, preferred pairing between heavy and light chains of some embodiments are indicated in the right hand column of Table 2.

[0183] In some embodiments, the extracellular ligand binding domain of the first receptor comprises a HC CDR1 comprising a sequence of SGDYYWS (SEQ ID NO: 438), a HC CDR2 comprising a sequence of YIYYSGSTYYNPSLKS (SEQ ID NO: 454), and HC CDR3 comprising a sequence of CAREDVVKGAFDIW (SEQ ID NO: 533), or CDR sequences having at most 1, 2 or 3 amino acid substitutions, insertions or deletions relative thereto. In some embodiments, the extracellular ligand binding domain of the first receptor comprises a HC CDR1 comprising a sequence of SGDYYWS (SEQ ID NO: 438), a HC CDR2 comprising a sequence of YIYYSGSTYYNPSLKS (SEQ ID NO: 454), and HC CDR3 comprising a sequence of CAREDVVKGAFDIW (SEQ ID NO: 533). In some embodiments, the extracellular ligand binding domain of the first receptor comprises a LC CDR1 comprising a sequence of RASQSISSYLN (SEQ ID NO: 535), a LC CDR2 comprising a sequence of AASSLQS (SEQ ID NO: 539), and a LC CDR3 comprising a sequence of QQSYSTPLT (SEQ ID NO: 542), or CDR sequences having at most 1, 2 or 3 amino acid substitutions, insertions or deletions relative thereto. In some embodiments, the extracellular ligand binding domain of the first receptor comprises a LC CDR1 comprising a sequence of RASQSISSYLN (SEQ ID NO: 535), a LC CDR2 comprising a sequence of AASSLQS (SEQ ID NO: 539), and a LC CDR3 comprising a sequence of QQSYSTPLT (SEQ ID NO: 542). In some embodiments, the extracellular ligand binding domain of the first receptor comprises a HC CDR1 comprising a sequence of SGDYYWS (SEQ ID NO: 438), a HC CDR2 comprising a sequence of YIYYSGSTYYNPSLKS (SEQ ID NO: 454), HC CDR3 comprising a sequence of CAREDVVKGAFDIW (SEQ ID NO: 533), a LC CDR1 comprising a sequence of RASQSISSYLN (SEQ ID NO: 535), a LC CDR2 comprising a sequence of AASSLQS (SEQ ID NO: 539), and a LC CDR3 comprising a sequence of QQSYSTPLT (SEQ ID NO: 542), or CDR sequences having at most 1, 2 or 3 amino acid substitutions, insertions or deletions relative thereto. In some embodiments, the extracellular ligand binding domain of the first receptor comprises a HC CDR1 comprising a sequence of SGDYYWS (SEQ ID NO: 438), a HC CDR2 comprising a sequence of YIYYSGSTYYNPSLKS (SEQ ID NO: 454), HC CDR3 comprising a sequence of CAREDVVKGAFDIW (SEQ ID NO: 533), a LC CDR1 comprising a sequence of RASQSISSYLN (SEQ ID NO: 535), a LC CDR2 comprising a sequence of AASSLQS (SEQ ID NO: 539), and a LC CDR3 comprising a sequence of QQSYSTPLT (SEQ ID NO: 542).

[0184] In some embodiments, the extracellular ligand binding domain of the first receptor comprises an scFv. In some embodiments, the scFv comprises a heavy chain comprising CDRs selected from the sequences of GYTMN (SEQ ID NO: 448), LITPYNGASSYNQKFRG (SEQ ID NO: 470) and GGYDGRGFDY (SEQ ID NO: 534). In some embodiments, the heavy chain comprises sequences of GYTMN (SEQ ID NO: 448), LITPYNGASSYNQKFRG (SEQ ID NO: 470) and GGYDGRGFDY (SEQ ID NO: 534). In some embodiments, the scFv comprising a light chain comprising CDRs selected from the sequences of SASSSVSYMH (SEQ ID NO: 538), DTSKLAS (SEQ ID NO: 541) and QQWSGYPLT (SEQ ID NO: 545). In some embodiments, the light chain comprises sequences of SASSSVSYMH (SEQ ID NO: 538), DTSKLAS (SEQ ID NO: 541) and QQWSGYPLT (SEQ ID NO: 545).

[0185] Sequences of exemplary heavy and light chains of antigen binding domains that are specific to MSLN are set forth in Tables 3 and 4 below. Light chains paired with heavy chains in preferred embodiments are indicated at right in Table 3.

TABLE 2
Sequences of heavy chain variable fragments (VH)

| | SEQ | | |
|---|---|---|---|
| | ID | | |
| # | NO | Heavy Chain (VH) | LC |
| 1 | 216 | EVQLVESGGGLVKPGGSLRLSCAASGFTFSNAWMSWVRQA | A |
| | | PGKGLEWVGRIKSKTDGGTTDYAAPVKGRFTISRDDSKNTL | |
| | | YLQMNSLKTEDTAVYYCTTDLPKLRNFHIWGQGTLVTVSS | |
| 2 | 217 | EVQLVESGGGLVQPGGSLRLSCAASGFTFSSYAMHWVRQAP | A |
| | | GKGLEYVSAISSNGGSTYYANSVKGRFTISRDNSKNTLYLQM | |
| | | GSLRAEDMAVYYCASLEYHGFRQYGLRYWHWGQGTLVTV | |
| | | SS | |
| 3 | 218 | QLQLQESGSGLVKPSQTLSLTCAVSGGSISSGGYSWSWIRQP | A |
| | | PGKGLEWIGYIYHSGSTYYNPSLKSRVTISVDRSKNQFSLKLS | |
| | | SVTAADTAVYYCASIKFWFAGINYFFPWGQGTLVTVSS | |
| 4 | 219 | EVQLVESGGGLVQPGGSLRLSCAASGFTFSSYWMHWVRQA | A |
| | | PGKGLVWVSRINSDGSSTSYADSVKGRFTISRDNAKNTLYLQ | |
| | | MNSLRAEDTAVYYCASGFLGMGSNFIWGQGTLVTVSS | |
| 5 | 220 | QVQLQESGPGLVKPSQTLSLTCTVSGGSISSGGYYWSWIRQH | A |
| | | PGKGLEWIGYIYYSGSTYYNPSLKSLVTISVDTSKNQFSLKLS | |
| | | SVTAADTAVYYCASGDRARYFDLWGRGTLVTVSS | |
| 6 | 221 | EVQLVESGGGLVQPGGSLRLSCAASGFTFSSYWMHWVRQA | A |
| | | PGKGLVWVSRINSDGSSTSYADSVKGRFTISRDNAKNTLYLQ | |
| | | MNSLRAEDTAVYYCARYPRGYHQMVDAFDIWGQGTMVTV | |
| | | SS | |
| 7 | 222 | QLQLQESGPGLVKPSETLSLTCTVSGGSISSSSYYWGWIRQPP | A |
| | | GKGLEWIGSIYYSGSTYYNPSLKSRVTISVDTSKNQFSLKLSS | |
| | | VTAADTAVYYCARVRFLAARTTIPEANFLWGQGTLVTVSS | |
| 8 | 223 | EVQLVESGGGLVQPGGSLRLSCAASGFTFSSYSMNWVRQAP | A |
| | | GKGLEWVSYISSSSSTIYYADSVKGRFTISRDNAKNSLYLQM | |
| | | NSLRAEDTAVYYCARVLSRARFDYWGQGTLVTVSS | |
| 9 | 224 | EVQLVESGGGLVKPGGSLRLSCAASGFTFSSYSMNWVRQAP | A |
| | | GKGLEWVSSISSSSSYIYYADSVKGRFTISRDNAKNSLYLQM | |
| | | NSLRAEDTAVYYCARLRGRVFDPWGQGTLVTVSS | |
| 10 | 225 | QLQLQESGPGLVKPSETLSLTCTVSGGSISSSSYYWGWIRQPP | A |
| | | GKGLEWIGSIYYSGSTYYNPSLKSRVTISVDTSKNQFSLKLSS | |
| | | VTAADTAVYYCARIKFTSFLYVHGFLWGQGTLVTVSS | |
| 11 | 226 | QVQLVQSGAEVKKPGASVKVSCKASGYTFTSYAMHWVRQ | A |
| | | APGQRLEWMGWINAGNGNTKYSQKFQGRVTITRDTSASTA | |
| | | YMELSSLRSEDTAVYYCARGQRWLYLGGIRRHWGQGTLVT | |
| | | VSS | |
| 12 | 227 | QVQLQESGPGLVKPSETLSLTCTVSGGSISSYYWSWIRQPPG | A |
| | | KGLEWIGYIYYSGSTNYNPSLKSRVTISVDTSKNQFSLKLSSV | |
| | | TAADTAVYYCAREWIPSRPYYFDYWGQGTLVTVSS | |
| 13 | 228 | QVQLQESGPGLVKPSQTLSLTCTVSGGSISSGGYYWSWIRQP | A |
| | | PGKGLEWIGYIYYSGSTYYNPSLKSRVTISVDTSKNQFSLKLS | |
| | | SVTAADTAVYYCARESTGTGAFDIWGQGTMVTVSS | |
| 14 | 229 | EVQLVESGGGVVRPGGSLRLSCAASGFTFDDYGMSWVRQA | A |
| | | PGKGLEWVSGINWNGGSTGYADSVKGRFTISRDNAKNSLYL | |
| | | QMNSLRAEDTALYHCARERYRRVLHWYFDLWGRGTLVTVS | |
| | | S | |
| 15 | 230 | QVQLVQSGAEVKKPGASVKVSCKASGYTFTSYDINWVRQA | A |
| | | TGQGLEWMGWMNPNSGNTGYAQKFQGRVTMTRNTSISTA | |
| | | YMELSSLRSEDTAVYYCAREPDAFDIWGQGTMVTVSS | |
| 16 | 231 | QVQLQESGPGLVKPSQTLSLTCTVSGGSISSGGYYWSWIRQP | A |
| | | PGKGLEWIGYIYYSGSTYYNPSLKSRVTISVDTSKNQFSLKLS | |
| | | SVTAADTAVYYCAREHMGTIPYYFDYWGQGTLVTVSS | |
| 17 | 232 | QVQLQESGPGLVKPSQTLSLTCTVSGGSISSGGYYWSWIRQP | A |
| | | PGKGLEWIGYIYYSGSTYYNPSLKSRVTISVDTSKNQFSLKLS | |
| | | SVTAADTAVYYCAREEFGYGDVLYWGQGTLVTVSS | |
| 18 | 233 | QVQLQESGPGLVKPSQTLSLTCTVSGGSISSGDYYWSWIRQP | A |
| | | PGKGLEWIGYIYYSGSTYYNPSLKSRVTISVDTSKNQFSLKLS | |
| | | SVTAADTAVYYCAREDVVKGAFDIWGQGTMVTVSS | |
| 19 | 234 | EVQLVESGGGLVQPGGSLRLSCAASGFTFSSYSMNWVRQAP | A |
| | | GKGLEWVSYISSSSSTIYYADSVKGRFTISRDNAKNSLYLQM | |
| | | NSLRAEDTAVYYCAREDFSHKLGYFQHWGQGTLVTVSS | |
| 20 | 235 | QVQLVESGGGLVKPGGSLRLSCAASGFTFSDYYMSWIRQAP | A |
| | | GKGLEWVSYISSSGSTIYYADSVKGRFTISRDNAKNSLYLQM | |
| | | NSLRAEDTAVYYCARDYDYVWGQGTLVTVSS | |
| 21 | 236 | QVQLQESGPGLVKPSQTLSLTCTVSGGSISSGDYYWSWIRQP | A |
| | | PGKGLEWIGYIYYSGSTYYNPSLKSRVTISVDTSKNQFSLKLS | |
| | | SVTAADTAVYYCARDRRDWDWFDPWGQGTLVTVSS | |
| 22 | 237 | QVQLQESGPGLVKPSGTLSLTCAVSGGSISSSNWWSWVRQP | A |
| | | PGKGLEWIGEIYHSGSTNYNPSLKSRVTISVDKSKNQFSLKLS | |
| | | SVTAADTAVYYCARDQQALKYRVDWGQGTLVTVSS | |
| 23 | 238 | QVQLVQSGAEVKKPGASVKVSCKASGYTFTSYGISWVRQAP | A |
| | | GQGLEWMGWISAYNGNTNYAQKLQGRVTMTTDTSTSTAY | |
| | | MELRSLRSDDTAVYYCARDLTLGCFDYWGQGTLVTVSS | |
| 24 | 239 | EVQLVESGGGLVQPGGSLRLSCAASGFTVSSNYMSWVRQAP | A |
| | | GKGLEWVSVIYSGGSTYYADSVKGRFTISRDNSKNTLYLQM | |
| | | NSLRAEDTAVYYCARDGSNSWYFDLWGRGTLVTVSS | |
| 25 | 240 | QVQLVESGGGVVQPGRSLRLSCAASGFTFSSYGMHWVRQA | A |
| | | PGKGLEWVAVIWYDGSNKYYADSVKGRFTISRDNSKNTLYL | |
| | | QMNSLRAEDTAVYYCARAFLFLSFSVWGQGTLVTVSS | |
| 26 | 241 | EVQLVESGGVVVQPGGSLRLSCAASGFTFDDYTMHWVRQA | A |
| | | PGKGLEWVSLISWDGGSTYYADSVKGRFTISRDNSKNSLYL | |
| | | QMNSLRTEDTALYYCAKGIFYSSKEDFDYWGQGTLVTVSS | |
| 27 | 242 | EVQLVESGGVVVQPGGSLRLSCAASGFTFDDYTMHWVRQA | A |
| | | PGKGLEWVSLISWDGGSTYYADSVKGRFTISRDNSKNSLYL | |
| | | QMNSLRTEDTALYYCAKDIWIFYSSNPKPTVYWGQGTLVTV | |
| | | SS | |
| 28 | 243 | QVQLVQSGSELKKPGASVKVSCKASGYTFTSYAMNWVRQA | A |
| | | PGQGLEWMGWINTNTGNPTYAQGFTGRFVFSFDTSVSTAYL | |
| | | QICSLKAEDTAVYYCARKDQTLTYGNWFDPWGQGTLVTVS | |
| | | S | |
| 29 | 244 | QVQLQESGPGLVKPSETLSLTCTVSGGSVSSGSYYWSWIRQP | A |
| | | PGKGLEWIGYIYYSGSTNYNPSLKSRVTISVDTSKNQFSLKLS | |
| | | SVTAADTAVYYCARDHYERGLYWGQGTLVTVSS | |
| 30 | 245 | QVQLVESGGGLVKPGGSLRLSCAASGFTFSDYYMSWIRQAP | B |
| | | GKGLEWVSYISSSGSTIYYADSVKGRFTISRDNAKNSLYLQM | |
| | | NSLRAEDTAVYYCARYMYNWYFDLWGRGTLVTVSS | |
| 31 | 246 | QVQLVESGGGLVKPGGSLRLSCAASGFTFSDYYMSWIRQAP | B |
| | | GKGLEWVSYISSSGSTIYYADSVKGRFTISRDNAKNSLYLQM | |
| | | NSLRAEDTAVYYCARDRRPAFDIWGQGTMVTVSS | |
| 32 | 247 | QVQLVESGGGLVKPGGSLRLSCAASGFTFSDYYMSWIRQAP | C |
| | | GKGLEWVSYISSSGSTIYYADSVKGRFTISRDNAKNSLYLQM | |
| | | NSLRAEDTAVYYCAVHLKRRPYFDYWGQGTLVTVSS | |
| 33 | 248 | QVQLVESGGGLVKPGGSLRLSCAASGFTFSDYYMSWIRQAP | C |
| | | GKGLEWVSYISSSGSTIYYADSVKGRFTISRDNAKNSLYLQM | |
| | | NSLRAEDTAVYYCASVHKKPIFDYWGQGTLVTVSS | |
| 34 | 249 | QVQLVESGGGLVKPGGSLRLSCAASGFTFSDYYMSWIRQAP | C |
| | | GKGLEWVSYISSSGSTIYYADSVKGRFTISRDNAKNSLYLQM | |
| | | NSLRAEDTAVYYCASTSRRCTFQHWGQGTLVTVSS | |
| 35 | 250 | QVQLVESGGGLVKPGGSLRLSCAASGFTFSDYYMSWIRQAP | C |
| | | GKGLEWVSYISSSGSTIYYADSVKGRFTISRDNAKNSLYLQM | |
| | | NSLRAEDTAVYYCASTSPRPLFQHWGQGTLVTVSS | |
| 36 | 251 | QVQLVESGGGLVKPGGSLRLSCAASGFTFSDYYMSWIRQAP | C |
| | | GKGLEWVSYISSSGSTIYYADSVKGRFTISRDNAKNSLYLQM | |
| | | NSLRAEDTAVYYCASPYQVRGVYFDYWGQGTLVTVSS | |
| 37 | 252 | QVQLVESGGGLVKPGGSLRLSCAASGFTFSDYYMSWIRQAP | C |
| | | GKGLEWVSYISSSGSTIYYADSVKGRFTISRDNAKNSLYLQM | |
| | | NSLRAEDTAVYYCASPYKKRRTVFDYWGQGTLVTVSS | |
| 38 | 253 | QVQLVESGGGLVKPGGSLRLSCAASGFTFSDYYMSWIRQAP | C |
| | | GKGLEWVSYISSSGSTIYYADSVKGRFTISRDNAKNSLYLQM | |
| | | NSLRAEDTAVYYCASLQRGLALFQHWGQGTLVTVSS | |
| 39 | 254 | QVQLVESGGGLVKPGGSLRLSCAASGFTFSDYYMSWIRQAP | C |
| | | GKGLEWVSYISSSGSTIYYADSVKGRFTISRDNAKNSLYLQM | |
| | | NSLRAEDTAVYYCASILSVPYFDLWGRGTLVTVSS | |
| 40 | 255 | QVQLVESGGGLVKPGGSLRLSCAASGFTFSDYYMSWIRQAP | C |
| | | GKGLEWVSYISSSGSTIYYADSVKGRFTISRDNAKNSLYLQM | |
| | | NSLRAEDTAVYYCASGWIRVPLRLPLFQHWGQGTLVTVSS | |
| 41 | 256 | QVQLVESGGGLVKPGGSLRLSCAASGFTFSDYYMSWIRQAP | C |
| | | GKGLEWVSYISSSGSTIYYADSVKGRFTISRDNAKNSLYLQM | |
| | | NSLRAEDTAVYYCARVTIFAIFDIWGQGTMVTVSS | |
| 42 | 257 | QVQLVESGGGLVKPGGSLRLSCAASGFTFSDYYMSWIRQAP | C |
| | | GKGLEWVSYISSSGSTIYYADSVKGRFTISRDNAKNSLYLQM | |
| | | NSLRAEDTAVYYCARVGRGFVHFDLWGRGTLVTVSS | |
| 43 | 259 | QVQLVESGGGLVKPGGSLRLSCAASGFTFSDYYMSWIRQAP | C |
| | | GKGLEWVSYISSSGSTIYYADSVKGRFTISRDNAKNSLYLQM | |
| | | NSLRAEDTAVYYCARTSRGLCVLFDYWGQGTLVTVSS | |
| 44 | 260 | QVQLVESGGGLVKPGGSLRLSCAASGFTFSDYYMSWIRQAP | C |
| | | GKGLEWVSYISSSGSTIYYADSVKGRFTISRDNAKNSLYLQM | |
| | | NSLRAEDTAVYYCARSGPSSYWYFDLWGRGTLVTVSS | |
| 45 | 261 | QVQLVESGGGLVKPGGSLRLSCAASGFTFSDYYMSWIRQAP | C |
| | | GKGLEWVSYISSSGSTIYYADSVKGRFTISRDNAKNSLYLQM | |
| | | NSLRAEDTAVYYCARNIYMGGIWFDPWGQGTLVTVSS | |
| 46 | 262 | QVQLVESGGGLVKPGGSLRLSCAASGFTFSDYYMSWIRQAP | C |
| | | GKGLEWVSYISSSGSTIYYADSVKGRFTISRDNAKNSLYLQM | |
| | | NSLRAEDTAVYYCARLTVRTGAFDIWGQGTMVTVSS | |
| 47 | 263 | QVQLVESGGGLVKPGGSLRLSCAASGFTFSDYYMSWIRQAP | C |
| | | GKGLEWVSYISSSGSTIYYADSVKGRFTISRDNAKNSLYLQM | |
| | | NSLRAEDTAVYYCARLRTAHLDFDLWGRGTLVTVSS | |
| 48 | 264 | QVQLVESGGGLVKPGGSLRLSCAASGFTFSDYYMSWIRQAP | C |
| | | GKGLEWVSYISSSGSTIYYADSVKGRFTISRDNAKNSLYLQM | |
| | | NSLRAEDTAVYYCARDLIFPVVFDYWGQGTLVTVSS | |
| 49 | 265 | QVQLVESGGGLVKPGGSLRLSCAASGFTFSDYYMSWIRQAP | C |
| | | GKGLEWVSYISSSGSTIYYADSVKGRFTISRDNAKNSLYLQM | |
| | | NSLRAEDTAVYYCARDGYRKYGYVFFDIWGQGTMVTVSS | |
| 50 | 266 | QVQLVESGGGLVKPGGSLRLSCAASGFTFSDYYMSWIRQAP | c |
| | | GKGLEWVSYISSSGSTIYYADSVKGRFTISRDNAKNSLYLQM | |
| | | NSLRAEDTAVYYCARDGRYRRFWHAFDIWGQGTMVTVSS | |
| 51 | 267 | QVQLVESGGGLVKPGGSLRLSCAASGFTFSDYYMSWIRQAP | c |
| | | GKGLEWVSYISSSGSTIYYADSVKGRFTISRDNAKNSLYLQM | |
| | | NSLRAEDTAVYYCARAHIRGYFDLWGRGTLVTVSS | |
| 52 | 268 | EVQLLESGGGLVQPGGSLRLSCAASGFTFSSYAMSWVRQAP | c |
| | | GKGLEWVSAISGSGGSTYYADSVKGRFTISRDNSKNTLYLQ | |
| | | MNSLRAEDTAVYYCATWMGGGGRWYFDLWGRGTLVTVSS | |
| 53 | 269 | EVQLLESGGGLVQPGGSLRLSCAASGFTFSSYAMSWVRQAP | c |
| | | GKGLEWVSAISGSGGSTYYADSVKGRFTISRDNSKNTLYLQ | |
| | | MNSLRAEDTAVYYCARTSRTTWYFDLWGRGTLVTVSS | |
| 54 | 270 | EVQLLESGGGLVQPGGSLRLSCAASGFTFSSYAMSWVRQAP | c |
| | | GKGLEWVSAISGSGGSTYYADSVKGRFTISRDNSKNTLYLQ | |
| | | MNSLRAEDTAVYYCAKWMGGGGRLYFDLWGRGTLVTVSS | |
| 55 | 271 | EVQLLESGGGLVQPGGSLRLSCAASGFTFSSYAMSWVRQAP | c |
| | | GKGLEWVSAISGSGGSTYYADSVKGRFTISRDNSKNTLYLQ | |
| | | MNSLRAEDTAVYYCAKWGGRLYWYFDLWGRGTLVTVSS | |
| 56 | 272 | EVQLLESGGGLVQPGGSLRLSCAASGFTFSSYAMSWVRQAP | C |
| | | GKGLEWVSAISGSGGSTYYADSVKGRFTISRDNSKNTLYLQ | |
| | | MNSLRAEDTAVYYCAKVIRQLWYFDLWGRGTLVTVSS | |
| 57 | 273 | EVQLLESGGGLVQPGGSLRLSCAASGFTFSSYAMSWVRQAP | C |
| | | GKGLEWVSAISGSGGSTYYADSVKGRFTISRDNSKNTLYLQ | |
| | | MNSLRAEDTAVYYCAKVFANSWYFDLWGRGTLVTVSS | |
| 58 | 274 | EVQLLESGGGLVQPGGSLRLSCAASGFTFSSYAMSWVRQAP | C |
| | | GKGLEWVSAISGSGGSTYYADSVKGRFTISRDNSKNTLYLQ | |
| | | MNSLRAEDTAVYYCAKVDRTTWYFDLWGRGTLVTVSS | |
| 59 | 275 | EVQLLESGGGLVQPGGSLRLSCAASGFTFSSYAMSWVRQAP | C |
| | | GKGLEWVSAISGSGGSTYYADSVKGRFTISRDNSKNTLYLQ | |
| | | MNSLRAEDTAVYYCAKRWGKDGPYWYFDLWGRGTLVTVS | |
| | | S | |
| 60 | 276 | EVQLLESGGGLVQPGGSLRLSCAASGFTFSSYAMSWVRQAP | C |
| | | GKGLEWVSAISGSGGSTYYADSVKGRFTISRDNSKNTLYLQ | |
| | | MNSLRAEDTAVYYCAKRRDSYGPYWYFDLWGRGTLVTVSS | |
| 61 | 277 | EVQLLESGGGLVQPGGSLRLSCAASGFTFSSYAMSWVRQAP | C |
| | | GKGLEWVSAISGSGGSTYYADSVKGRFTISRDNSKNTLYLQ | |
| | | MNSLRAEDTAVYYCAKNRPPPGYWYFDLWGRGTLVTVSS | |
| 62 | 278 | EVQLLESGGGLVQPGGSLRLSCAASGFTFSSYAMSWVRQAP | C |
| | | GKGLEWVSAISGSGGSTYYADSVKGRFTISRDNSKNTLYLQ | |
| | | MNSLRAEDTAVYYCAKGRRFSWYFDLWGRGTLVTVSS | |

TABLE 3
Sequences of light chain variable fragments (VL)

| | SEQ | |
|---|---|---|
| | ID | |
| # | NO | Light Chain (VL) |
| A | 279 | DIQMTQSPSSLSASVGDRVTITCRASQSISSYLNWYQQKPGKAPKLLI |
| | | YAASSLQSGVPSRFSGSGSGTDFTLTISSLQPEDFATYYCQQSYSTPLT |
| | | FGGGTKVEIK |
| B | 280 | DIQMTQSPSSVSASVGDRVTITCRASQGISSWLAWYQQKPGKAPKLLI |
| | | YAASSLQSGVPSRFSGSGSGTDFTLTISSLQPEDFATYYCQQANSFPLT |
| | | FGGGTKVEIK |
| C | 281 | AIQLTQSPSSLSASVGDRVTITCRASQGISSALAWYQQKPGKAPKLLI |
| | | YDASSLESGVPSRFSGSGSGTDFTLTISSLQPEDFATYYCQQFNSYPLT |
| | | FGGGTKVEIK |
| D | 282 | AIQLTQSPSSLSASVGDRVTITCRASQGISSALAWYQQKPGKAPKLLI |
| | | YDASSLESGVPSRFSGSGSGTDFTLTISSLQPEDFATYYCQQFNNYPLT |
| | | FGGGTKVEIK |

[0186] In some embodiments, the extracellular ligand binding domain of the first receptor comprises a variable heavy region (VH) sequence set forth in Table 3. In some embodiments, the extracellular ligand binding domain of the first receptor comprises a VH sequence that has at least 80%, at least 85%, at least 90%, at least 91%, at least 92%, at least 93%, at least 94%, at least 95%, at least 96%, at least 97%, at least 98%, or at least 99% sequence identity to a VH set forth in Table 3. In some embodiments, the extracellular ligand binding domain of the first receptor comprises a variable light region (VL) sequence set forth in Table 4. In some embodiments, the extracellular ligand binding domain of the first receptor comprises a VL sequence that has at least 80%, at least 85%, at least 90%, at least 91%, at least 92%, at least 93%, at least 94%, at least 95%, at least 96%, at least 97%, at least 98%, or at least 99% sequence identity to a VL set forth set forth in Table 4.

[0187] In some embodiments, a the extracellular ligand binding domain of the first receptor comprises a VH that (i) comprises the HC CDR1, the HC CDR2, and the HC CDR3 sequences set forth in Table 2 (e.g., the HC CDR 1, the HC CDR2, and the HC CDR 3 of line #1, line #2, line #3, etc. of Table 2) and (ii) has at least 80%, at least 85%, at least 90%, at least 91%, at least 92%, at least 93%, at least 94%, at least 95%, at least 96%, at least 97%, at least 98%, or at least 99% sequence identity to a VH sequence set forth in Table 3. In some embodiments, extracellular ligand binding domain of the first receptor (i) comprises the LC CDR1, the LC CDR2, and the LC CDR3 sequences set forth in one line Table 2 (e.g., the LC CDR 1, the LC CDR2, and the LC CDR 3 of line A, line B, or line C of Table 2) and a VL sequence set forth in Table 4 and (ii) has at least 80%, at least 85%, at least 90%, at least 91%, at least 92%, at least 93%, at least 94%, at least 95%, at least 96%, at least 97%, at least 98%, or at least 99% sequence identity to a VL set forth set forth in Table 4.

[0188] In some embodiments, the extracellular ligand binding domain of the first receptor comprises (i) a VH sequence set forth in Table 3 or a VH sequence that has at least 80%, at least 85%, at least 90%, at least 91%, at least 92%, at least 93%, at least 94%, at least 95%, at least 96%, at least 97%, at least 98%, or at least 99% sequence identity to a VH set forth in Table 3, and (ii) a VL sequence set forth in Table 4 or a VL that has at least 80%, at least 85%, at least 90%, at least 91%, at least 92%, at least 93%, at least 94%, at least 95%, at least 96%, at least 97%, at least 98%, or at least 99% sequence identity to a VL set forth set forth in Table 4. In each case, the VH may be paired with any of the VLs, as the heavy chains and light chains share similarity, with routine testing to confirm desired expression and binding activity; however, the preferred pairing between Table 3 and Table 4 is indicated in the “LC” column of Table 3, corresponding to the #column of Table 4.

[0189] In some embodiments, the extracellular ligand binding domain of the first receptor comprises a VH sequence of SEQ ID NO: 233, or a sequence that has at least 80%, at least 85%, at least 90%, at least 91%, at least 92%, at least 93%, at least 94%, at least 95%, at least 96%, at least 97%, at least 98%, or at least 99% sequence identity thereto. In some embodiments, the extracellular ligand binding domain of the first receptor comprises a VH sequence of SEQ ID NO: 233.

[0190] In some embodiments, the extracellular ligand binding domain of the first receptor comprises a VL sequence of SEQ ID NO: 279, or a sequence that has at least 80%, at least 85%, at least 90%, at least 91%, at least 92%, at least 93%, at least 94%, at least 95%, at least 96%, at least 97%, at least 98%, or at least 99% sequence identity thereto. In some embodiments, the extracellular ligand binding domain of the first receptor comprises a VL sequence of SEQ ID NO: 279. In some embodiments, the extracellular ligand binding domain of the first receptor comprises a VH sequence of SEQ ID NO: 233, and a VL sequence of SEQ ID NO: 279, or sequences that have at least 80%, at least 85%, at least 90%, at least 91%, at least 92%, at least 93%, at least 94%, at least 95%, at least 96%, at least 97%, at least 98%, or at least 99% sequence identity thereto. In some embodiments the VH and VL are separated for a linker, for example a linker comprising a sequence of GGGGSGGGGSGGGGSGG (SEQ ID NO: 152). The VH and VL can be in any orientation, for example VH, linker, VL; or alternatively, VL, linker VH.

[0191] In some embodiments, one or more (e.g., 1, 2, 3, 4, 5, or 6) amino acid residues in a CDR of the antigen binding domains provided herein are substituted with another amino acid. The substitution may be “conservative” in the sense of being a substitution within the same family of amino acids. The naturally occurring amino acids may be divided into the following four families and conservative substitutions will take place within those families: (1) amino acids with basic side chains: lysine, arginine, histidine; (2) amino acids with acidic side chains: aspartic acid, glutamic acid; (3) amino acids with uncharged polar side chains: asparagine, glutamine, serine, threonine, tyrosine; and (4) amino acids with nonpolar side chains: glycine, alanine, valine, leucine, isoleucine, proline, phenylalanine, methionine, tryptophan, cysteine. By varying the amino acid sequence of the CDRs of an antibody by addition, deletion or substitution of amino acids, various effects such as increased binding affinity for the target antigen may be obtained.

### Chimeric Antigen Receptors (CARs)

[0192] The disclosure provides a first, activator receptor and immune cells comprising same. In some embodiments, the first receptor is a chimeric antigen receptor.

[0193] The term “chimeric antigen receptors (CARs)” as used herein, may refer to artificial receptors derived from T-cell receptors and encompasses engineered receptors that graft an artificial specificity onto a particular immune effector cell. CARs may be employed to impart the specificity of a monoclonal antibody onto a T cell, thereby allowing a large number of specific T cells to be generated, for example, for use in adoptive cell therapy. In specific embodiments, CARs direct specificity of the cell to a tumor associated antigen, for example. Exemplary CARs comprise an intracellular activation domain, a transmembrane domain, and an extracellular domain comprising a tumor associated antigen binding region. In some embodiments, CARs further comprise a hinge domain. In particular aspects, CARs comprise fusions of single-chain variable fragments (scFv) derived from monoclonal antibodies, fused to a CD3 transmembrane domain and endodomain. The specificity of other CAR designs may be derived from ligands of receptors (e.g., peptides). In certain cases, CARs comprise domains for additional co-stimulatory signaling, such as CD3, 4-1BB, FcR, CD27, CD28, CD137, DAP10, and/or OX40. In some cases, molecules can be co-expressed with the CAR, including co-stimulatory molecules, reporter genes for imaging, gene products that conditionally ablate the T cells upon addition of a pro-drug, homing receptors, cytokines, and cytokine receptors.

[0194] In some embodiments, the extracellular ligand binding domain of the first receptor is fused to the extracellular domain of a CAR.

[0195] In some embodiments, the CARs of the present disclosure comprise an extracellular hinge region. Incorporation of a hinge region can affect cytokine production from CAR-T cells and improve expansion of CAR-T cells in vivo. Exemplary hinges can be isolated or derived from IgD and CD8 domains, for example IgG1. In some embodiments, the hinge is isolated or derived from CD8α or CD28.

[0196] In some embodiments, the hinge is isolated or derived from CD8α or CD28. In some embodiments, the CD8α hinge comprises an amino acid sequence having at least 80% identity, at least 90% identity, at least 95% identity, at least 99% identity or is identical to a sequence of TTTPAPRPPTPAPTIASQPLSLRPEACRPAAGGAVHTRGLDFACD (SEQ ID NO: 7). In some embodiments, the CD8α hinge comprises SEQ ID NO: 7. In some embodiments, the CD8α hinge consists essentially of SEQ ID NO: 7. In some embodiments, the CD8α hinge is encoded by a nucleotide sequence having at least 80% identity, at least 90% identity, at least 95% identity, at least 99% identity or is identical to a sequence of

(SEQ. ID. NO: 8)
ACCACGACGCCAGCGCCGCGACCACCAACACCGGCGCCCACCATCG
CGTCGCAGCCCCTGTCCCTGCGCCCAGAGGCGTGCCGGCCAGCGGC
GGGGGGCGCAGTGCACACGAGGGGGCTGGACTTCGCCTGTGAT.

In some embodiments, the CD8α hinge is encoded by SEQ ID NO: 8.

[0197] In some embodiments, the CD28 hinge comprises an amino acid sequence having at least 80% identity, at least 90% identity, at least 95% identity, at least 99% identity or is identical to a sequence of CTIEVMYPPPYLDNEKSNGTIIHVKGKHLCPSPLFPGPSKP (SEQ ID NO: 9). In some embodiments, the CD28 hinge comprises or consists essentially of SEQ ID NO: 9. In some embodiments, the CD28 hinge is encoded by a nucleotide sequence having at least 80% identity, at least 90% identity, at least 95% identity, at least 99% identity or is identical to a sequence of

(SEQ. ID. NO: 10)
TGTACCATTGAAGTTATGTATCCTCCTCCTTACCTAGACAATGAGAA
GAGCAATGGAACCATTATCCATGTGAAAGGGAAACACCTTTGTCCAA
GTCCCCTATTTCCCGGACCTTCTAAGCCC.

In some embodiments, the CD28 hinge is encoded by SEQ ID NO: 10.

[0198] The CARs of the present disclosure can be designed to comprise a transmembrane domain that is fused to the extracellular domain of the CAR. In some embodiments, the transmembrane domain that naturally is associated with one of the domains in the CAR is used. For example, a CAR comprising a CD28 co-stimulatory domain might also use a CD28 transmembrane domain. In some instances, the transmembrane domain can be selected or modified by amino acid substitution to avoid binding of such domains to the transmembrane domains of the same or different surface membrane proteins to minimize interactions with other members of the receptor complex.

[0199] The transmembrane domain may be derived either from a natural or from a synthetic source. Where the source is natural, the domain may be derived from any membrane-bound or transmembrane protein. Transmembrane regions may be isolated or derived from (i.e. comprise at least the transmembrane region(s) of) the alpha, beta or zeta chain of the T-cell receptor, CD28, CD3 epsilon, CD45, CD4, CD5, CD8, CD9, CD16, CD22, CD33, CD37, CD64, CD80, CD86, CD134, CD137, CD154, or from an immunoglobulin such as IgG4. Alternatively the transmembrane domain may be synthetic, in which case it will comprise predominantly hydrophobic residues such as leucine and valine. In some embodiments, a triplet of phenylalanine, tryptophan and valine will be found at each end of a synthetic transmembrane domain. Optionally, a short oligo- or polypeptide linker, preferably between 2 and 10 amino acids in length may form the linkage between the transmembrane domain and the cytoplasmic signaling domain of the CAR. A glycine-serine doublet provides a particularly suitable linker.

[0200] In some embodiments of the CARs of the disclosure, the CARs comprise a CD28 transmembrane domain. In some embodiments, the CD28 transmembrane domain comprises an amino acid sequence having at least 80% identity, at least 90% identity, at least 95% identity, at least 99% identity or is identical to a sequence of FWVLVVVGGVLACYSLLVTVAFIIFWV (SEQ ID NO: 11). In some embodiments, the CD28 transmembrane domain comprises or consists essentially of SEQ ID NO: 11. In some embodiments, the CD28 transmembrane domain is encoded by a nucleotide sequence having at least 80% identity, at least 90% identity, at least 95% identity, at least 99% identity or is identical to a sequence of

(SEQ ID NO: 12)
TTCTGGGTGCTGGTCGTTGTGGGCGGCGTGCTGGCCTGCTACAGCCTGCTG
GTGACAGTGGCCTTCATCATCTTTTGGGTG.

In some embodiments, the CD28 transmembrane domain is encoded by SEQ ID NO: 12.

[0201] In some embodiments of the CARs of the disclosure, the CARs comprise an IL-2Rbeta transmembrane domain. In some embodiments, the IL-2Rbeta transmembrane domain comprises an amino acid sequence having at least 80% identity, at least 90% identity, at least 95% identity, at least 99% identity or is identical to a sequence of IPWLGHLLVGLSGAFGFIILVYLLI (SEQ ID NO: 13). In some embodiments, the IL-2Rbeta transmembrane domain comprises or consists essentially of SEQ ID NO: 13. In some embodiments, the IL-2Rbeta transmembrane domain is encoded by a nucleotide sequence having at least 80% identity, at least 90% identity, at least 95% identity, at least 99% identity or is identical to a sequence of

(SEQ ID NO: 14)
ATTCCGTGGC TCGGCCACCT CCTCGTGGGC CTCAGCGGGG CTTTTGG
CTT CATCATCTTA GTGTACTTGC TGATC.

In some embodiments, the IL-2Rbeta transmembrane domain is encoded by SEQ ID NO: 14.

[0202] The cytoplasmic domain or otherwise the intracellular signaling domain of the CARs of the instant disclosure is responsible for activation of at least one of the normal effector functions of the immune cell in which the CAR has been placed. The term “effector function” refers to a specialized function of a cell. Thus the term “intracellular signaling domain” refers to the portion of a protein which transduces the effector function signal and directs the cell to perform a specialized function. While usually the entire intracellular signaling domain can be employed, in many cases it is not necessary to use the entire domain. To the extent that a truncated portion of the intracellular signaling domain is used, such truncated portion may be used in place of the intact chain as long as it transduces the effector function signal. In some cases, multiple intracellular domains can be combined to achieve the desired functions of the CAR-T cells of the instant disclosure. The term intracellular signaling domain is thus meant to include any truncated portion of one or more intracellular signaling domains sufficient to transduce the effector function signal.

[0203] Examples of intracellular signaling domains for use in the CARs of the instant disclosure include the cytoplasmic sequences of the T cell receptor (TCR) and co-receptors that act in concert to initiate signal transduction following antigen receptor engagement, as well as any derivative or variant of these sequences and any synthetic sequence that has the same functional capability.

[0204] Accordingly, the intracellular domain of CARs of the instant disclosure comprises at least one cytoplasmic activation domain. In some embodiments, the intracellular activation domain ensures that there is T-cell receptor (TCR) signaling necessary to activate the effector functions of the CAR T-cell. In some embodiments, the at least one cytoplasmic activation is a CD247 molecule (CD3ζ) activation domain, a stimulatory killer immunoglobulin-like receptor (KIR) KIR2DS2 activation domain, or a DNAX-activating protein of 12 kDa (DAP12) activation domain.

[0205] In some embodiments, the CD3ζ activation domain comprises an amino acid sequence having at least 80% identity, at least 90% identity, at least 95% identity, at least 99% identity or is identical to a sequence of

(SEQ ID NO: 15)
RVKFSRSADAPAYKQGQNQLYNELNLGRREEYDVLDKRRGRDPEMGGKPRR
KNPQEGLYNELQKDKMAEAYSEIGMKGERRRGKGHDGLYQGLSTATKDTYD
ALHMQALPPR.

[0206] In some embodiments, the CD3ζ activation domain comprises or consists essentially of SEQ ID NO: 15. In some embodiments, the CD3ζ activation domain is encoded by a nucleotide sequence having at least 80% identity, at least 90% identity, at least 95% identity, at least 99% identity or is identical to a sequence of

(SEQ ID NO: 16)
AGAGTGAAGTTCAGCAGGAGCGCAGACGCCCCCGCGTACAAGCAGGGCCAG
AACCAGCTCTATAACGAGCTCAATCTAGGACGAAGAGAGGAGTACGATGTT
TTGGACAAGCGTAGAGGCCGGGACCCTGAGATGGGGGGAAAGCCGAGAAGG
AAGAACCCTCAGGAAGGCCTGTACAATGAACTGCAGAAAGATAAGATGGCG
GAGGCCTACAGTGAGATTGGGATGAAAGGCGAGCGCCGGAGGGGCAAGGGG
CACGATGGCCTTTACCAGGGACTCAGTACAGCCACCAAGGACACCTACGAC
GCCCTTCACATGCAGGCCCTGCCCCCTCGC.

In some embodiments, the CD3ζ activation domain is encoded by SEQ ID NO: 16).

[0207] It is known that signals generated through the TCR alone are often insufficient for full activation of the T cell and that a secondary or co-stimulatory signal is also required. Thus, T cell activation can be said to be mediated by two distinct classes of cytoplasmic signaling sequence: those that initiate antigen-dependent primary activation through the TCR (primary cytoplasmic signaling sequences) and those that act in an antigen-independent manner to provide a secondary or co-stimulatory signal (secondary cytoplasmic signaling sequences).

[0208] Primary cytoplasmic signaling sequences regulate primary activation of the TCR complex either in a stimulatory way, or in an inhibitory way. Primary cytoplasmic signaling sequences that act in a stimulatory manner may contain signaling motifs, which are known as immunoreceptor tyrosine-based activation motifs or ITAMs. In some embodiments, the ITAM contains a tyrosine separated from a leucine or an isoleucine by any two other amino acids (YxxL/I (SEQ ID NO: 546)). In some embodiments, the cytoplasmic domain contains 1, 2, 3, 4 or 5 ITAMs. An exemplary ITAM containing cytoplasmic domain is the CD3 activation domain. Further examples of ITAM containing primary cytoplasmic signaling sequences that can be used in the CARs of the instant disclosure include those derived from TCRζ, FcRγ, FcRβ, CD3γ, CD3δ, CD3ε, CD3ζ, CD5, CD22, CD79a, CD79b, and CD66d.

[0209] In some embodiments, the CD3ζ activation domain comprising a single ITAM comprises an amino acid sequence having at least 80% identity, at least 90% identity, at least 95% identity, at least 99% identity or is identical to a sequence of

(SEQ ID NO: 17)
RVKFSRSADAPAYQQGQNQLYNELNLGRREEYDVLHMQALPPR.

In some embodiments, the CD3ζ activation domain comprises SEQ ID NO: 17. In some embodiments, the CD3ζ activation domain comprising a single ITAM consists essentially of an amino acid sequence of

(SEQ ID NO: 17)
RVKFSRSADAPAYQQGQNQLYNELNLGRREEYDVLHMQALPPR.

In some embodiments, the CD3ζ activation domain comprising a single ITAM is encoded by a nucleotide sequence having at least 80% identity, at least 90% identity, at least 95% identity, at least 99% identity or is identical to a sequence of

(SEQ ID NO: 18)
AGAGTGAAGT TCAGCAGGAG CGCAGACGCC CCCGCGTACC
AGCAGGGCCA GAACCAGCTC TATAACGAGC TCAATCTAGG
ACGAAGAGAG GAGTACGATG TTTTGCACAT GCAGGCCCTG
CCCCCTCGC.

In some embodiments, the CD3ζ activation domain is encoded by SEQ ID NO: 18.

[0210] In some embodiments, the cytoplasmic domain of the CAR can be designed to comprise the CD3ζ signaling domain by itself or combined with any other desired cytoplasmic domain(s) useful in the context of the CAR of the instant disclosure. For example, the cytoplasmic domain of the CAR can comprise a CD3ζ chain portion and a co-stimulatory domain. The co-stimulatory domain refers to a portion of the CAR comprising the intracellular domain of a costimulatory molecule. A costimulatory molecule is a cell surface molecule other than an antigen receptor or its ligands that is required for an efficient response of lymphocytes to an antigen. Examples of such molecules include the co-stimulatory domain is selected from the group consisting of IL-2Rβ, Fc Receptor gamma (FcRγ), Fc Receptor beta (FcRβ), CD3g molecule gamma (CD3γ), CD3δ, CD3ε, CD5 molecule (CD5), CD22 molecule (CD22), CD79a molecule (CD79a), CD79b molecule (CD79b), carcinoembryonic antigen related cell adhesion molecule 3 (CD66d), CD27 molecule (CD27), CD28 molecule (CD28), TNF receptor superfamily member 9 (4-1BB), TNF receptor superfamily member 4 (OX40), TNF receptor superfamily member 8 (CD30), CD40 molecule (CD40), programmed cell death 1 (PD-1), inducible T cell costimulatory (ICOS), lymphocyte function-associated antigen-1 (LFA-1), CD2 molecule (CD2), CD7 molecule (CD7), TNF superfamily member 14 (LIGHT), killer cell lectin like receptor C2 (NKG2C) and CD276 molecule (B7-H3) c-stimulatory domains, or functional variants thereof. In some embodiments, the intracellular domains of CARs of the instant disclosure comprise at least one co-stimulatory domain. In some embodiments, the co-stimulatory domain is isolated or derived from CD28.

[0211] In some embodiments, the intracellular domains of CARs of the instant disclosure comprise at least one co-stimulatory domain. In some embodiments, the co-stimulatory domain is isolated or derived from CD28. In some embodiments, the CD28 co-stimulatory domain comprises an amino acid sequence having at least 80% identity, at least 90% identity, at least 95% identity, at least 99% identity or is identical to a sequence of RSKRSRLLHSDYMNMTPRRPGPTRKHYQPYAPPRDFAAYRS (SEQ ID NO: 19). In some embodiments, the CD28 co-stimulatory domain comprises or consists essentially of SEQ ID NO: 19. In some embodiments, the CD28 co-stimulatory domain is encoded by a nucleotide sequence having at least 80% identity, at least 90% identity, at least 95% identity, at least 99% identity or is identical to a sequence of AGGAGCAAGCGGAGCAGACTGCTGCACAGCGACTACATGAACATGACCCCCCGG AGGCCTGGCCCCACCCGGAAGCACTACCAGCCCTACGCCCCTCCCAGGGATTTCG CCGCCTACCGGAGC (SEQ ID NO: 20). In some embodiments, the CD28 co-stimulatory domain is encoded by SEQ ID NO: 20.

[0212] In some embodiments, the co-stimulatory domain is isolated or derived from 4-1BB. In some embodiments, the 4-1BB co-stimulatory domain comprises an amino acid sequence having at least 80% identity, at least 90% identity, at least 95% identity, at least 99% identity or is identical to a sequence of KRGRKKLLYIFKQPFMRPVQTTQEEDGCSCRFPEEEEGGCEL (SEQ ID NO: 283). In some embodiments, the 4-1BB co-stimulatory domain comprises or consists essentially of KRGRKKLLYIFKQPFMRPVQTTQEEDGCSCRFPEEEEGGCEL (SEQ ID NO: 283). In some embodiments, the 4-1BB co-stimulatory domain s encoded by a nucleotide sequence having at least 80% identity, at least 90% identity, at least 95% identity, at least 99% identity or is identical to a sequence of

(SEQ ID NO: 284)
AAACGGGGCAGAAAGAAACTCCTGTATATATTCAAACAACCATTTATGAGG
CCAGTACAAACTACTCAAGAGGAAGATGGCTGTAGCTGCCGATTTCCAGAA
GAAGAAGAAGGAGGATGTGAACTG.

[0213] In some embodiments, the intracellular domain of the CAR comprises a CD28 co-stimulatory domain, a 4-1BB costimulatory domain, and a CD3ζ activation domain. In some embodiments, the intracellular domain of the CAR comprises a sequence of RSKRSRLLHSDYMNMTPRRPGPTRKHYQPYAPPRDFAAYRSKRGRKKLLYIFKQPF MRPVQTTQEEDGCSCRFPEEEEGGCELRVKFSRSADAPAYKQGQNQLYNELNLGRR EEYDVLDKRRGRDPEMGGKPRRKNPQEGLYNELQKDKMAEAYSEIGMKGERRRGK GHDGLYQGLSTATKDTYDALHMQALPPR (SEQ ID NO: 285), or a sequence having at least 80% identity, at least 90% identity, at least 95% identity, at least 99% identity thereto.

[0214] The cytoplasmic domains within the cytoplasmic signaling portion of the CARs of the instant disclosure may be linked to each other in a random or specified order. Optionally, a short oligo- or polypeptide linker, for example between 2 and 10 amino acids in length may form the linkage. A glycine-serine doublet provides an example of a suitable linker. An exemplary linker comprises a sequence of GGGGSGGGGSGGGGSGG (SEQ ID NO: 152).

[0215] The cytoplasmic domains within the cytoplasmic signaling portion of the CARs of the instant disclosure may be linked to each other in a random or specified order. Optionally, a short oligo- or polypeptide linker, for example between 2 and 10 amino acids in length may form the linkage. A glycine-serine doublet provides an example of a suitable linker. Exemplary full length activator receptors of the disclosure are described in Table 20. In some embodiments, the first activator receptor comprises a sequence of SEQ ID NOS: 286-347, as set forth in Table 20, or a sequence having at least 90%, at least 95%, at least 97% or at least 99% identity thereto. In some embodiments, the first activator receptor comprises a sequence of SEQ ID NOS: 286-347, as set forth in Table 20. In some embodiments, the first activator receptor comprises a sequence of SEQ ID NO: 288, or a sequence having at least 90%, at least 95%, at least 97% or at least 99% identity thereto. In some embodiments, the first activator receptor comprises a sequence of SEQ ID NO: 297, or a sequence having at least 90%, at least 95%, at least 97% or at least 99% identity thereto. In some embodiments, the first activator receptor comprises a sequence of SEQ ID NO: 301, or a sequence having at least 90%, at least 95%, at least 97% or at least 99% identity thereto. In some embodiments, the first activator receptor comprises a sequence of SEQ ID NO: 302, or a sequence having at least 90%, at least 95%, at least 97% or at least 99% identity thereto. In some embodiments, the first activator receptor comprises a sequence of SEQ ID NO: 303, or a sequence having at least 90%, at least 95%, at least 97% or at least 99% identity thereto. In some embodiments, the first activator receptor comprises a sequence of SEQ ID NO: 314, or a sequence having at least 90%, at least 95%, at least 97% or at least 99% identity thereto. In some embodiments, the first activator receptor comprises a sequence of SEQ ID NO: 335, or a sequence having at least 90%, at least 95%, at least 97% or at least 99% identity thereto. In some embodiments, the first activator receptor comprises a sequence of SEQ ID NO: 340, or a sequence having at least 90%, at least 95%, at least 97% or at least 99% identity thereto. In some embodiments, the first activator receptor comprises a sequence of SEQ ID NO: 344, or a sequence having at least 90%, at least 95%, at least 97% or at least 99% identity thereto.

[0216] The cytoplasmic domains within the cytoplasmic signaling portion of the CARs of the instant disclosure may be linked to each other in a random or specified order. Optionally, a short oligo- or polypeptide linker, for example between 2 and 10 amino acids in length may form the linkage. A glycine-serine doublet provides an example of a suitable linker.

### T Cell Receptors (TCRs)

[0217] The disclosure provides a first, activator receptor and immune cells comprising same. In some embodiments, the first receptor is a T cell receptor (TCR).

[0218] As used herein, a “TCR”, sometimes also called a “TCR complex” or “TCR/CD3 complex” refers to a protein complex comprising a TCR alpha chain, a TCR beta chain, and one or more of the invariant CD3ζ chains (zeta, gamma, delta and epsilon), sometimes referred to as subunits. The TCR alpha and beta chains can be disulfide-linked to function as a heterodimer to bind to peptide-MHC complexes. Once the TCR alpha/beta heterodimer engages peptide-MHC, conformational changes in the TCR complex in the associated invariant CD3ζ subunits are induced, which leads to their phosphorylation and association with downstream proteins, thereby transducing a primary stimulatory signal. In an exemplary TCR complex, the TCR alpha and TCR beta polypeptides form a heterodimer, CD3ζ epsilon and CD3ζ delta form a heterodimer, CD3ζ epsilon and CD3ζ gamma for a heterodimer, and two CD3ζ zeta form a homodimer.

[0219] Any suitable ligand binding domain may be fused to an extracellular domain, hinge domain or transmembrane of the TCRs described herein. For example, the ligand binding domain can be an antigen binding domain of an antibody or TCR, or comprise an antibody fragment, a Vβ only domain, a linear antibody, a single-chain variable fragment (scFv), or a single domain antibody (sdAb).

[0220] In some embodiments, the ligand binding domain is fused to one or more extracellular domains or transmembrane domains of one or more TCR subunits. The TCR subunit can be TCR alpha, TCR beta, CD3 delta, CD3 epsilon, CD3 gamma or CD3 zeta. For example, the ligand binding domain can be fused to TCR alpha, or TCR beta, or portions of the ligand binding can be fused to two subunits, for example portions of the ligand binding domain can be fused to both TCR alpha and TCR beta.

[0221] TCR subunits include TCR alpha, TCR beta, CD3 zeta, CD3 delta, CD3 gamma and CD3 epsilon. Any one or more of TCR alpha, TCR beta chain, CD3 gamma, CD3 delta, CD3 epsilon, or CD3 zeta, or fragments or derivative thereof, can be fused to one or more domains capable of providing a stimulatory signal of the disclosure, thereby enhancing TCR function and activity.

[0222] TCR transmembrane domains isolated or derived from any source are envisaged as within the scope of the disclosure. The transmembrane domain may be derived either from a natural or from a recombinant source. Where the source is natural, the domain may be derived from any membrane-bound or transmembrane protein.

[0223] In some embodiments, the transmembrane domain is capable of signaling to the intracellular domain(s) whenever the TCR complex has bound to a target. A transmembrane domain of particular use in this disclosure may include at least the transmembrane region(s) of e.g., the alpha, beta or zeta chain of the TCR, CD3 delta, CD3 epsilon or CD3 gamma, CD28, CD3 epsilon, CD45, CD4, CD5, CD8, CD9, CD16, CD22, CD33, CD37, CD64, CD80, CD86, CD134, CD137, CD154.

[0224] In some embodiments, the transmembrane domain can be attached to the extracellular region of a polypeptide of the TCR, e.g., the antigen binding domain of the TCR alpha or beta chain, via a hinge, e.g., a hinge from a human protein. For example, the hinge can be a human immunoglobulin (Ig) hinge, e.g., an IgG4 hinge, or a CD8α hinge. In some embodiments, the hinge is isolated or derived from CD8α or CD28.

[0225] In some embodiments, the extracellular ligand binding domain is attached to one or more transmembrane domains of the TCR. In some embodiments, the transmembrane domain comprises a TCR alpha transmembrane domain, a TCR beta transmembrane domain, or both. In some embodiments, the transmembrane comprises a CD3 zeta transmembrane domain.

[0226] A transmembrane domain can include one or more additional amino acids adjacent to the transmembrane region, e.g., one or more amino acid associated with the extracellular region of the protein from which the transmembrane was derived (e.g., 1, 2, 3, 4, 5, 6, 7, 8, 9, 10 or up to 15 amino acids of the extracellular region) and/or one or more additional amino acids associated with the intracellular region of the protein from which the transmembrane protein is derived (e.g., 1, 2, 3, 4, 5, 6, 7, 8, 9, 10 or up to 15 amino acids of the intracellular region).

[0227] In some embodiments, the transmembrane domain can be selected or modified by amino acid substitution to avoid binding of such domains to the transmembrane domains of the same or different surface membrane proteins, e.g., to minimize interactions with other members of the receptor complex.

[0228] When present, the transmembrane domain may be a natural TCR transmembrane domain, a natural transmembrane domain from a heterologous membrane protein, or an artificial transmembrane domain. The transmembrane domain may be a membrane anchor domain. Without limitation, a natural or artificial transmembrane domain may comprise a hydrophobic a-helix of about 20 amino acids, often with positive charges flanking the transmembrane segment. The transmembrane domain may have one transmembrane segment or more than one transmembrane segment. Prediction of transmembrane domains/segments may be made using publicly available prediction tools (e.g. TMHMM, Krogh et al. Journal of Molecular Biology 2001; 305(3):567-580; or TMpred, Hofmann & Stoffel Biol. Chem. Hoppe-Seyler 1993; 347: 166). Non-limiting examples of membrane anchor systems include platelet derived growth factor receptor (PDGFR) transmembrane domain, glycosylphosphatidylinositol (GPI) anchor (added post-translationally to a signal sequence) and the like.

[0229] In some embodiments, the transmembrane domain comprises a TCR alpha transmembrane domain. In some embodiments, the TCR alpha transmembrane domain comprises an amino acid sequence having at least 85% identity, at least 90% identity, at least 95% identity, at least 96% identity, at least 97% identity, at least 98% identity, at least 99% identity or is identical to a sequence of: VIGFRILLLKVAGFNLLMTLRLW (SEQ ID NO: 21). In some embodiments, the TCR alpha transmembrane domain comprises, or consists essentially of, SEQ ID NO: 21. In some embodiments, the TCR alpha transmembrane domain is encoded by a sequence of

(SEQ ID NO: 22)
GTGATTGGGTTCCGAATCCTCCTCCTGAAAGTGGCCGGGTTTAATCTGCTC
ATGACGCTGCGGCTGTGG.

[0230] In some embodiments, the transmembrane domain comprises a TCR beta transmembrane domain. In some embodiments, the TCR beta transmembrane domain comprises an amino acid sequence having at least 85% identity, at least 90% identity, at least 95% identity, at least 96% identity, at least 97% identity, at least 98% identity, at least 99% identity or is identical to a sequence of: TILYEILLGKATLYAVLVSALVL (SEQ ID NO: 23). In some embodiments, the TCR beta transmembrane domain comprises, or consists essentially of, SEQ ID NO: 23. In some embodiments, the TCR beta transmembrane domain is encoded by a sequence of

(SEQ ID NO: 24)
ACCATCCTCTATGAGATCTTGCTAGGGAAGGCCACCTTGTATGCCGTGCTG
GTCAGTGCCCTCGTGCTG.

[0231] TCRs of the disclosure can comprise one or more intracellular domains. Exemplary TCRs comprising intracellular domains for use in the instant disclosure are described in PCT/US2020/045250 filed on Sep. 6, 2020, the contents of which are incorporated herein by reference. In some embodiments, the intracellular domain comprises one or more domains capable of providing a stimulatory signal to a transmembrane domain. In some embodiments, the intracellular domain comprises a first intracellular domain capable of providing a stimulatory signal and a second intracellular domain capable of providing a stimulatory signal. In other embodiments, the intracellular domain comprises a first, second and third intracellular domain capable of providing a stimulatory signal. The intracellular domains capable of providing a stimulatory signal are selected from the group consisting of a CD28 molecule (CD28) domain, a LCK proto-oncogene, Src family tyrosine kinase (Lck) domain, a TNF receptor superfamily member 9 (4-1BB) domain, a TNF receptor superfamily member 18 (GITR) domain, a CD4 molecule (CD4) domain, a CD8α molecule (CD8a) domain, a FYN proto-oncogene, Src family tyrosine kinase (Fyn) domain, a zeta chain of T cell receptor associated protein kinase 70 (ZAP70) domain, a linker for activation of T cells (LAT) domain, lymphocyte cytosolic protein 2 (SLP76) domain, (TCR) alpha, TCR beta, CD3 delta, CD3 gamma and CD3 epsilon intracellular domains.

[0232] In some embodiments, an intracellular domain comprises at least one intracellular signaling domain. An intracellular signaling domain generates a signal that promotes a function a cell, for example an immune effector function of a TCR containing cell, e.g., a TCR-expressing T-cell. In some embodiments, the intracellular domain of the first receptor of the disclosure includes at least one intracellular signaling domain. For example, the intracellular domains of CD3 gamma, delta or epsilon comprise signaling domains.

[0233] In some embodiments, the extracellular domain, transmembrane domain and intracellular domain are isolated or derived from the same protein, for example T-cell receptor (TCR) alpha, TCR beta, CD3 delta, CD3 gamma, CD3 epsilon or CD3 zeta.

[0234] Examples of intracellular domains for use in activator receptors of the disclosure include the cytoplasmic sequences of the TCR alpha, TCR beta, CD3 zeta, and 4-1BB, and the intracellular signaling co-receptors that act in concert to initiate signal transduction following antigen receptor engagement, as well as any derivative or variant of these sequences and any recombinant sequence that has the same functional capability.

[0235] In some embodiments, the intracellular signaling domain comprises a primary intracellular signaling domain. Exemplary primary intracellular signaling domains include those derived from the proteins responsible for primary stimulation, or antigen dependent stimulation.

[0236] In some embodiments, the intracellular domain comprises a CD3 delta intracellular domain, a CD3 epsilon intracellular domain, a CD3 gamma intracellular domain, a CD3 zeta intracellular domain, a TCR alpha intracellular domain or a TCR beta intracellular domain.

[0237] In some embodiments, the intracellular domain comprises a TCR alpha intracellular domain. In some embodiments, a TCR alpha intracellular domain comprises Ser-Ser. In some embodiments, a TCR alpha intracellular domain is encoded by a sequence of TCCAGC.

[0238] In some embodiments, the intracellular domain comprises a TCR beta intracellular domain. In some embodiments, the TCR beta intracellular domain comprises an amino acid sequence having at least 80% identity, at least 90% identity, or is identical to a sequence of: MAMVKRKDSR (SEQ ID NO: 25). In some embodiments, the TCR beta intracellular domain comprises, or consists essentially of SEQ ID NO: 25. In some embodiments, the TCR beta intracellular domain is encoded by a sequence of

(SEQ ID NO: 26)
ATGGCCATGGTCAAGAGAAAGGATTCCAGA.

[0239] In some embodiments, the intracellular signaling domain comprises at least one stimulatory intracellular domain. In some embodiments, the intracellular signaling domain comprises a primary intracellular signaling domain, such as a CD3 delta, CD3 gamma and CD3 epsilon intracellular domain, and one additional stimulatory intracellular domain, for example a co-stimulatory domain. In some embodiments, the intracellular signaling domain comprises a primary intracellular signaling domain, such as a CD3 delta, CD3 gamma and CD3 epsilon intracellular domain, and two additional stimulatory intracellular domains.

[0240] Exemplary co-stimulatory intracellular signaling domains include those derived from proteins responsible for co-stimulatory signals, or antigen independent stimulation. Co-stimulatory molecules include, but are not limited to an MHC class I molecule, BTLA, a Toll ligand receptor, as well as DAP10, DAP12, CD30, LIGHT, OX40, CD2, CD27, CDS, ICAM-1, LFA-1 (CD11a/CD18) 4-1BB (CD137, TNF receptor superfamily member 9), and CD28 molecule (CD28). A co-stimulatory protein can be represented in the following protein families: TNF receptor proteins, Immunoglobulin-like proteins, cytokine receptors, integrins, signaling lymphocytic activation molecules (SLAM proteins), and activating NK cell receptors. Examples of such molecules include CD27, CD28, 4-1BB (CD137), OX40, GITR, CD30, CD40, ICOS, BAFFR, HVEM, lymphocyte function-associated antigen-1 (LFA-1), CD2, CD7, LIGHT, NKG2C, SLAMF7, NKp80, CD160, B7-H3, a ligand that specifically binds with CD83, CD4, and the like. The co-stimulatory domain can comprise the entire intracellular portion, or the entire native intracellular signaling domain, of the molecule from which it is derived, or a functional variant thereof.

[0241] In some embodiments, the stimulatory domain comprises a co-stimulatory domain. In some embodiments, the co-stimulatory domain comprises a CD28 or 4-1BB co-stimulatory domain. CD28 and 4-1BB are well characterized co-stimulatory molecules required for full T cell activation and known to enhance T cell effector function. For example, CD28 and 4-1BB have been utilized in chimeric antigen receptors (CARs) to boost cytokine release, cytolytic function, and persistence over the first-generation CAR containing only the CD3 zeta signaling domain. Likewise, inclusion of co-stimulatory domains, for example CD28 and 4-1BB domains, in TCRs can increase T cell effector function and specifically allow co-stimulation in the absence of co-stimulatory ligand, which is typically down-regulated on the surface of tumor cells. In some embodiments, the stimulatory domain comprises a CD28 intracellular domain or a 4-1BB intracellular domain.

### Inhibitory Receptors

[0242] The disclosure provides a second receptor, comprising an extracellular ligand binding domain specific to a non-target antigen that has been lost in a cancer cell, such as an allelic variant of a gene. The non-target allelic variant can be lost in the cancer cell through any mechanism, such as, without limitation, epigenetic changes that effect non-target allelic variant expression, mutations to the gene encoding the non-target allelic variant, disruption of cellular signaling that regulates expression of the non-target allelic variant, chromosome loss, partial or complete deletion of the genomic locus, gene silencing through modification of nucleic acids or heterochromatin, or loss of expression through other mechanisms. In variations of the compositions and methods disclosed herein, the cells or subject treated may exhibit a loss of expression of the non-target allelic variant because of non-genetic changes. Accordingly the disclosure provides compositions and methods for killing cells and/or treating subject lacking expression of the non-target antigen from any cause, including but not limited to, loss of heterozygosity.

[0243] The non-target antigen can be a protein, or an antigen peptide thereof in a complex with a major histocompatibility complex class I (MHC-I), where the non-target antigen comprises a polymorphism. Because the non-target antigen is polymorphic, loss of a single copy of the gene encoding the non-target antigen, which may occur through loss of heterozygosity in a cancer cell, yields a cancer cell that retains the other polymorphic variant of gene, but has lost the non-target antigen. For example, a subject having HLA-A*02 and HLA-A*01 alleles at the HLA locus may have a cancer in which only the HLA-A*02 allele is lost. In such a subject, the HLA-A*01 protein remains present, but is not recognized by the inhibitory receptor of immune cells encountering the cancer cell, because the inhibitor receptor is designed to be specific to the HLA-A*02 (or other non-target antigen). In normal non-malignant cells, the HLA-A*02 (or other non-target antigen) is present and inhibits activation of the engineered immune cell. In cancer cells having loss of heterozygosity, the HLA-A*02 allelic variant (or other non-target antigen) is lost. Immune cells engineered to express the inhibitory receptor do not receive an inhibitory signal from the inhibitory receptor, as the inhibitory receptor only responds to the HLA-A*02 (or other non-target antigen), which is absent on cancer cells. By this mechanism, the immune cell is selectively activated, and selectively kills, cancer cells expressing MSLN but having lost HLA-A*02 (or another non-target antigen) due to loss-of-heterozygosity. HLA-A is used here as an example. Similar polymorphic variation occurs in the population at other MHC genes and in other non-MHC genes as well. Accordingly, the disclosure provides a second receptor, comprising an extracellular ligand binding domain specific to a non-target antigen selected from intercellular adhesion molecule 1 (ICAM1), catechol-O-methyltransferase (COMT), C—X—C motif chemokine ligand 16 (CXCL16), leucine rich repeat neuronal 4 (LRRN4) and uroplakin 3B (UPK3B), or an antigen peptide thereof in a complex with a major histocompatibility complex class I (MHC-I), wherein the non-target antigen may comprise a nonsynonymous, extracellular-domain polymorphism (e.g., in an extracellular domain of ICAM1, COMT, CXCL16), and immune cells comprising same. In some embodiments, the second receptor is an inhibitory chimeric antigen receptor. Alternatively, the non-target antigen may comprise a protein whose expression is lost in tumors, but present in key MSLN-expression normal tissues (e.g., LRRN4, UPK3B).

[0244] Exemplary inhibitory receptors are described in PCT/US2020/045228 filed on Sep. 6, 2020, PCT/US2020/064607, filed on Dec. 11, 2020, PCT/US2021/029907, filed on Apr. 29, 2021 and PCT/US2020/059856 filed on Nov. 10, 2020, the contents of each of which are incorporated herein by reference.

[0245] In some embodiments, the second receptor is humanized.

[0246] The disclosure provides a second receptor, which is an inhibitory receptor, comprising an extracellular ligand binding that can discriminate between single amino-acid variant alleles of a non-target antigen. This ability to discriminate between allelic variants of a non-target antigen allows the second receptor to inhibit activation of immune cells comprising the second receptor in the presence of non-target cells that express that the allele recognized by the ligand binding domain. However, activation of immune cells is not inhibited in the presence of target cells that have lost the allele, for example cancer cells that have lost one allele of a gene through loss of heterozygosity.

[0247] The disclosure provides a second receptor, which is an inhibitory receptor, comprising an extracellular ligand binding that can discriminate between different levels of expression of a non-target antigen. This allows the second receptor to inhibit activation of immune cells comprising the second receptor in the presence of non-target cells that express the ligand for the second receptor, but to allow activation of immune cells in the presence of cancer cells that express low levels, or have no expression, of the ligand for the second receptor.

### Inhibitor Ligands

[0248] In some embodiments, the non-target antigen is not expressed by the target cells, and is expressed by non-target cells. In some embodiments, the non-target antigen is expressed by healthy cells, i.e. cells that are not cancer cells. In some embodiments, the target cells are a plurality of cancer cells that have lost expression of the non-target antigen through loss of heterozygosity (LOH). In some embodiments, the non-target cells are a plurality of healthy cells (i.e., non-cancer cells), that express both the target and the non-target antigen.

[0249] Any cell surface molecule expressed by the non-target cells that is not expressed by target cells may be a suitable non-target antigen for the second receptor extracellular ligand binding domain. For example, a cell adhesion molecule, a cell-cell signaling molecule, an extracellular domain, a molecule involved in chemotaxis, a glycoprotein, a G protein-coupled receptor, a transmembrane, a receptor for a neurotransmitter or a voltage gated ion channel can be used as a non-target antigen.

[0250] In some embodiments, the target antigen is a peptide antigen of a cancer cell-specific antigen in a complex with a major histocompatibility complex class I (MHC-I).

[0251] In some embodiments, the non-target antigen is lost in the cancer cells due to loss of heterozygosity. Exemplary non-target antigens lost in cancer cells due to loss of heterozygosity include ICAM1, COMT and CXCL16. In some embodiments, the non-target antigen is selected from the group consisting of a polymorphic variant of ICAM1, COMT and CXCL16. IN some embodiments, the non-target antigen is an antigen peptide comprising a polymorphic residue of ICAM1, COMT or CXCL16 in a complex with a major histocompatibility complex class I (MHC-I).

[0252] Non-target major histocompatibility complex class I MHC-I (or pMHC-I) antigens comprising any of HLA-A, HLA-B, HLA-C or HLA-E are envisaged as within the scope of the disclosure. In some embodiments, the non-target antigen comprises a Major Histocompatibility Complex (MHC) protein. In some embodiments, the MHC is MHC class I. In some embodiments, the MHC class I protein comprises a human leukocyte antigen (HLA) protein. In some embodiments, the non-target antigen comprises an allele of an HLA Class I protein selected from the group consisting of HLA-A, HLA-B, HLA-C, or HLA-E. In some embodiments, the HLA-A allele comprises HLA-A*01, HLA-A*02, HLA-A*03 or HLA-A*11. In some embodiments, the HLA-B allele comprises HLA-B*07. In some embodiments, the HLA-C allele comprises HLA-C*07.

[0253] In some embodiments, the non-target antigen comprises HLA-A. In some embodiments, the non-target antigen comprises an allele of HLA-A. in some embodiments, the allele of HLA-A comprises HLA-A*01, HLA-A*02, HLA-A*03 or HLA-A*11. In some embodiments, the non-target antigen comprises HLA-A*69. In some embodiments, the non-target antigen comprises a human leukocyte antigen A*02 allele (HLA-A*02).

[0254] In some embodiments, the non-target antigen comprises an allele of HLA-B. In some embodiments, the allele of HLA-B comprises HLA-B*07.

[0255] In some embodiments, the non-target antigen comprises HLA-C. In some embodiments, the HLA-C allele comprises HLA-C*07.

[0256] In some embodiments, the non-target antigen comprises ICAM1 or an antigen peptide thereof in a complex with MHC-I. Human ICAM1 is frequently lost through LOH in cancer cells.

[0257] A wild type Human ICAM1 is described in NCBI record number NP_000192.2 the contents of which are incorporated by reference herein in their entirety. In some embodiments, ICAM1 comprises an amino acid sequence of:

| (SEQ ID NO 27) | |
|---|---|
| 1 | MAPSSPRPAL PALLVLLGAL FPGPGNAQTS VSPSKVILPR GGSVLVTCST SCDQPKLLGI |
| 61 | ETPLPKKELL LPGNNRKVYE LSNVQEDSQP MCYSNCPDGQ STAKTFLTVY WTPERVELAP |
| 121 | LPSWQPVGKN LTLRCQVEGG APRANLTVVL LRGEKELKRE PAVGEPAEVT TTVLVRRDHH |
| 181 | GANFSCRTEL DLRPQGLELF ENTSAPYQLQ TFVLPATPPQ LVSPRVLEVD TQGTVVCSLD |
| 241 | GLFPVSEAQV HLALGDQRLN PTVTYGNDSF SAKASVSVTA EDEGTQRLTC AVILGNQSQE |
| 301 | TLQTVTIYSF PAPNVILTKP EVSEGTEVTV KCEAHPRAKV TLNGVPAQPL GPRAQLLLKA |
| 361 | TPEDNGRSFS CSATLEVAGQ LIHKNQTREL RVLYGPRLDE RDCPGNWTWP ENSQQTPMCQ |
| 421 | AWGNPLPELK CLKDGTFPLP IGESVTVTRD LEGTYLCRAR STQGEVTRKV TVNVLSPRYE |
| 481 | IVIITVVAAA VIMGTAGLST YLYNRQRKIK KYRLQQAQKG TPMKPNTQAT PP. |

[0258] In some embodiments, ICAM1 comprises a sequence that shares at least 80%, at least 85%, at least 90%, at least 95%, at least 96%, at least 97%, at least 98%, or at least 99% identity to SEQ ID NO: 27. Polymorphic residues of ICAM1 are marked as bold and underlined in SEQ ID NO: 27. For example, rs5498 is a polymorphism at position 469 of SEQ ID NO: 27, which can be a K or an E.

[0259] In some embodiments, the non-target antigen comprises a polymorphism of ICAM1. For example, the non-target antigen comprises a peptide derived from ICAM1 comprising a polymorphic residue of ICAM1. Polymorphic residues of ICAM1 include amino acid residue 469 of SEQ ID NO: 27. In some embodiments, the non-target antigen comprises a peptide of ICAM1 comprising amino acid 469 of SEQ ID NO: 27. In some embodiments, the non-target antigen comprises a K at position 469 of SEQ ID NO: 27. In some embodiments, the non-target antigen comprises an E at position 469 of SEQ ID NO: 27.

[0260] In some embodiments, the non-target antigen comprises an ICAM1 polymorphism with an K at position 469 of SEQ ID NO: 27, and the second receptor comprises a ligand binding domain with a higher affinity for an ICAM1 ligand with an K at position 469 of SEQ ID NO: 27 than for an ICAM1 ligand with an E at position 469 of SEQ ID NO: 27. In some embodiments, the non-target antigen comprises an ICAM1 polymorphism with an E at position 469 of SEQ ID NO: 27, and the second receptor comprises a ligand binding domain with a higher affinity for an ICAM1 ligand with an E at position 469 of SEQ ID NO: 27 than for an ICAM1 ligand with a K at position 469 of SEQ ID NO: 27.

[0261] In some embodiments, the non-target antigen comprises COMT or an antigen peptide thereof in a complex with MHC-I. Human COMT is frequently lost through LOH in cancer cells.

[0262] A wild type Human COMT is described in NCBI record number NP_000192.2, the contents of which are incorporated by reference herein in their entirety. In some embodiments, COMT comprises an amino acid sequence of:

| (SEQ ID NO: 28) | |
|---|---|
| 1 | MPEAPPLLLA AVLLGLVLLV VLLLLLRHWG WGLCLIGWNE FILQPIHNLL MGDTKEQRIL |
| 61 | NHVLQHAEPG NAQSVLEAID TYCEQKEWAM NVGDKKGKIV DAVIQEHQPS VLLELGAYCG |
| 121 | YSAVRMARLL SPGARLITIE INPDCAAITQ RMVDFAGVKD KVTLVVGASQ DIIPQLKKKY |
| 181 | DVDTLDMVFL DHWKDRYLPD TLLLEECGLL RKGTVLLADN VICPGAPDFL AHVRGSSCFE |
| 241 | CTHYQSFLEY REVVDGLEKA IYKGPGSEAG P. |

[0263] In some embodiments, COMT comprises a sequence that shares at least 80%, at least 85%, at least 90%, at least 95%, at least 96%, at least 97%, at least 98%, or at least 99% identity to SEQ ID NO: 28. Polymorphic residues of COMT are marked as bold and underlined in SEQ ID NO: 28. For example, V158M is a polymorphism at position 158 of SEQ ID NO: 28, which can be a V or an M.

[0264] In some embodiments, the non-target antigen comprises a polymorphism of COMT. For example, the non-target antigen comprises a peptide derived from COMT comprising a polymorphic residue of COMT. Polymorphic residues of COMT 1 include amino acid residue 158 of SEQ ID NO: 28. In some embodiments, the non-target antigen comprises a peptide of COMT comprising amino acid 158 of SEQ ID NO: 28. In some embodiments, the non-target antigen comprises a V at position 158 of SEQ ID NO: 28. In some embodiments, the non-target antigen comprises an M at position 158 of SEQ ID NO: 28.

[0265] In some embodiments, the non-target antigen comprises a COMT polymorphism with a V at position 158 of SEQ ID NO: 28, and the second receptor comprises a ligand binding domain with a higher affinity for a COMT ligand with an V at position 158 of SEQ ID NO: 28 than for a COMT ligand with an M at position 158 of SEQ ID NO: 28. In some embodiments, the non-target antigen comprises a COMT polymorphism with a M at position 158 of SEQ ID NO: 28, and the second receptor comprises a ligand binding domain with a higher affinity for a COMT ligand with an M at position 158 of SEQ ID NO: 28 than for a COMT ligand with a V at position 158 of SEQ ID NO: 28.

[0266] In some embodiments, the non-target antigen comprises C—X—C motif chemokine ligand 16 (CXCL16) or an antigen peptide thereof in a complex with MHC-I. Human CXCL16 precursor is described in NCBI record number NP_001094282.1, the contents of which are incorporated by reference herein in their entirety. In some embodiments, CXCL16 comprises an amino acid sequence of:

| (SEQ ID NO: 29) | |
|---|---|
| 1 | MSGSQSEVAP SPQSPRSPEM GRDLRPGSRV LLLLLLLLLV YLTQPGNGNE GSVTGSCYCG |
| 61 | KRISSDSPPS VQFMNRLRKH LRAYHRCLYY TRFQLLSWSV CGGNKDPWVQ ELMSCLDLKE |
| 121 | CGHAYSGIVA HQKHLLPTSP PISQASEGAS SDIHTPAQML LSTLQSTQRP TLPVGSLSSD |
| 181 | KELTRPNETT IHTAGHSLAA GPEAGENQKQ PEKNAGPTAR TSATVPVLCL LAIIEILTAA |
| 241 | LSYVLCKRRR GQSPQSSPDL PVHYIPVAPD SNT. |

[0267] In some embodiments, the non-target antigen comprises a polymorphism of CXCL16. For example, the non-target antigen comprises a peptide derived from CXCL16 comprising a polymorphic residue of CXCL16. Polymorphic residues of CXCL16 include positions 142 and 200 of SEQ ID NO: 29. In some embodiments, the non-target antigen comprises a peptide of CXCL16 comprising amino acid 142 or 200 of SEQ ID NO: 29. In some embodiments, the non-target antigen comprises a peptide of CXCL16 comprising an A at amino acid 200 of SEQ ID NO: 29. In some embodiments, the non-target antigen comprises a peptide of CXCL16 comprising a V at amino acid 200 of SEQ ID NO: 29. In some embodiments, the non-target antigen comprises a peptide of CXCL16 comprising an I at amino acid 142 of SEQ ID NO: 29. In some embodiments, the non-target antigen comprises a peptide of CXCL16 comprising a T at amino acid 142 of SEQ ID NO: 29.

[0268] In some embodiments, the non-target antigen comprises a polymorphism of CXCL16. In some embodiments, the non-target antigen comprises a peptide of CXCL16 comprising an A at amino acid 200 of SEQ ID NO: 29, and the second receptor comprises a ligand binding domain with a higher affinity for a CXCL16 ligand with an A at position 200 of SEQ ID NO: 29 than for a CXCL16 ligand with a V at position 200 of SEQ ID NO: 29. In some embodiments, the non-target antigen comprises a peptide of CXCL16 comprising a V at amino acid 200 of SEQ ID NO: 29, and the second receptor comprises a ligand binding domain with a higher affinity for a CXCL16 ligand with a V at position 200 of SEQ ID NO: 29 than for a CXCL16 ligand with an A at position 200 of SEQ ID NO: 29. In some embodiments, the non-target antigen comprises a peptide of CXCL16 comprising an I at amino acid 142 of SEQ ID NO: 29, and the second receptor comprises a ligand binding domain with a higher affinity for a CXCL16 ligand with an I at position 142 of SEQ ID NO: 29 than for a CXCL16 ligand with a T at position 142 of SEQ ID NO: 29. In some embodiments, the non-target antigen comprises a peptide of CXCL16 comprising a T at amino acid 142 of SEQ ID NO: 29, and the second receptor comprises a ligand binding domain with a higher affinity for a CXCL16 ligand with a T at position 142 of SEQ ID NO: 29 than for a CXCL16 ligand with an I at position 142 of SEQ ID NO: 29.

[0269] In some embodiments, the non-target antigen comprises HLA-A*01, HLA-A*02, HLA-A*03, HLA-A*11, HLA-B*07 or HLA-C*07. Various single variable domains that bind to or recognize the specified HLA alleles, for use in embodiments described herein, are described in Table 5. (complementarity determining regions underlined):

TABLE 5
HLA scFv binding domains
HLA-A*02 antigen binding domains

| | |
|---|---|
| DVLMTQTPLSLPVSL | GATGTTTTGATGACCCAAACTCCACTCTCCCTGCCT |
| GDQASISCRSSQSIVH | GTCAGTCTTGGAGATCAAGCCTCCATCTCTTGCAG |
| SNGNTYLEWYLQKP | ATCTAGTCAGAGCATTGTACATAGTAATGGAAACA |
| GQSPKLLIYKVSNRF | CCTATTTAGAATGGTACCTGCAGAAACCAGGCCAG |
| SGVPDRFSGSGSGTD | TCTCCAAAGCTCCTGATCTACAAAGTTTCCAACCG |
| FTLKISRVEAEDLGV | ATTTTCTGGGGTCCCAGACAGGTTCAGTGGCAGTG |
| YYCFQGSHVPRTSGG | GATCAGGGACAGATTTCACACTCAAGATCAGTAGA |
| GTKLEIKGGGGSGGG | GTGGAGGCTGAGGATCTGGGAGTTTATTACTGCTT |
| GSGGGGSGGQVQLQ | TCAAGGTTCACATGTTCCTCGGACGTCCGGTGGAG |
| QSGPELVKPGASVRI | GCACCAAGCTGGAAATCAAAGGCGGAGGTGGAAG |
| SCKASGYTFTSYHIH | CGGAGGGGGAGGATCTGGCGGCGGAGGAAGCGGA |
| WVKQRPGQGLEWIG | GGCCAGGTCCAGCTGCAGCAGTCTGGACCTGAGCT |
| WIYPGNVNTEYNEK | GGTGAAGCCTGGGGCTTCAGTGAGGATATCCTGCA |
| FKGKATLTADKSSST | AGGCTTCTGGCTACACCTTCACAAGTTACCATATA |
| AYMHLSSLTSEDSAV | CATTGGGTGAAGCAGAGGCCTGGACAGGGACTTG |
| YFCAREEITYAMDY | AGTGGATTGGATGGATTTATCCTGGAAATGTTAAT |
| WGQGTSVTVSS (SEQ | ACTGAGTACAATGAGAAGTTCAAGGGCAAGGCCA |
| ID NO: 30) | CACTGACTGCAGACAAATCGTCCAGCACAGCCTAC |
| | ATGCACCTCAGCAGCCTGACCTCTGAGGACTCTGC |
| | GGTCTATTTCTGTGCCAGAGAGGAGATTACCTATG |
| | CTATGGACTACTGGGGTCAAGGAACCTCAGTCACC |
| | GTGTCCTCA (SEQ ID NO: 548) |
| QVQLVQSGAEVKKP | CAGGTGCAGCTGGTGCAGTCTGGGGCTGAGGTGAA |
| GSSVKVSCKASGYTF | GAAGCCTGGGTCCTCAGTGAAGGTTTCCTGCAAGG |
| TSYHIHWVRQAPGQ | CTTCTGGATACACCTTCACTAGCTATCATATACATT |
| GLEWMGWIYPGNVN | GGGTGCGCCAGGCCCCCGGACAAGGGCTTGAGTG |
| TEYNEKFKGKATITA | GATGGGATGGATCTACCCTGGCAATGTTAACACAG |
| DKSTSTAYMELSSLR | AATATAATGAGAAGTTCAAGGGCAAAGCCACCATT |
| SEDTAVYYCAREEIT | ACCGCGGACAAATCCACGAGCACAGCCTACATGG |
| YAMDYWGQGTTVT | AGCTGAGCAGCCTGAGATCTGAAGACACGGCTGTG |
| VSSGGGGSGGGGSG | TATTACTGTGCGAGGGAGGAAATTACCTACGCTAT |
| GGGSGGEIVLTQSPG | GGACTACTGGGGCCAGGGAACCACAGTCACCGTGT |
| TLSLSPGERATLSCRS | CCTCAGGCGGAGGTGGAAGCGGAGGGGGAGGATC |
| SQSIVHSNGNTYLEW | TGGCGGCGGAGGAAGCGGAGGCGAGATTGTATTG |
| YQQKPGQAPRLLIYK | ACCCAGAGCCCAGGCACCCTGAGCCTCTCTCCAGG |
| VSNRFSGIPDRFSGSG | AGAGCGGGCCACCCTCAGTTGTAGATCCAGTCAGA |
| SGTDFTLTISRLEPED | GTATTGTACACAGTAATGGGAACACCTATTTGGAA |
| FAVYYCFQGSHVPRT | TGGTATCAGCAGAAACCAGGTCAAGCCCCAAGATT |
| FGGGTKVEIK (SEQ | GCTCATCTACAAAGTCTCTAACAGATTTAGTGGTA |
| ID NO: 31) | TTCCAGACAGGTTCAGCGGTTCCGGAAGTGGTACT |
| | GATTTCACCCTCACGATCTCCAGGCTCGAGCCAGA |
| | AGATTTCGCCGTTTATTACTGTTTTCAAGGTTCACA |
| | TGTGCCGCGCACATTCGGTGGGGGTACTAAAGTAG |
| | AAATCAAA (SEQ ID NO: 549) |
| QVQLVQSGAEVKKP | CAGGTGCAGCTGGTGCAGTCTGGGGCTGAGGTGAA |
| GSSVKVSCKASGYTF | GAAGCCTGGGTCCTCAGTGAAGGTTTCCTGCAAGG |
| TSYHIHWVRQAPGQ | CTTCTGGATACACCTTCACTAGCTATCATATACATT |
| GLEWMGWIYPGNVN | GGGTGCGCCAGGCCCCCGGACAAGGGCTTGAGTG |
| TEYNEKFKGKATITA | GATGGGATGGATCTACCCTGGCAATGTTAACACAG |
| DKSTSTAYMELSSLR | AATATAATGAGAAGTTCAAGGGCAAAGCCACCATT |
| SEDTAVYYCAREEIT | ACCGCGGACAAATCCACGAGCACAGCCTACATGG |
| YAMDYWGQGTTVT | AGCTGAGCAGCCTGAGATCTGAAGACACGGCTGTG |
| VSSGGGGSGGGGSG | TATTACTGTGCGAGGGAGGAAATTACCTACGCTAT |
| GGGSGGDIVMTQTPL | GGACTACTGGGGCCAGGGAACCACAGTCACCGTGT |
| SLPVTPGEPASISCRS | CCTCAGGCGGAGGTGGAAGCGGAGGGGGAGGATC |
| SQSIVHSNGNTYLEW | TGGCGGCGGAGGAAGCGGAGGCGACATTGTAATG |
| YLQKPGQSPQLLIYK | ACCCAGACCCCACTCAGCCTGCCCGTCACTCCAGG |
| VSNRFSGVPDRFSGS | AGAGCCGGCCAGCATCAGTTGTAGATCCAGTCAGA |
| GSGTDFTLKISRVEA | GTATTGTACACAGTAATGGGAACACCTATTTGGAA |
| EDVGVYYCFQGSHV | TGGTATCTGCAGAAACCAGGTCAATCCCCACAATT |
| PRTFGGGTKVEIK | GCTCATCTACAAAGTCTCTAACAGATTTAGTGGTG |
| (SEQ ID NO: 32) | TACCAGACAGGTTCAGCGGTTCCGGAAGTGGTACT |
| | GATTTCACCCTCAAGATCTCCAGGGTCGAGGCAGA |
| | AGATGTCGGCGTTTATTACTGTTTTCAAGGTTCACA |
| | TGTGCCGCGCACATTCGGTGGGGGTACTAAAGTAG |
| | AAATCAAA (SEQ ID NO: 550) |
| EVQLVESGGGLVKP | GAGGTGCAGCTGGTGGAGTCTGGGGGTGGGCTGGT |
| GGSLRLSCAASGYTF | GAAGCCTGGGGGCTCACTGAGGCTTTCCTGCGCGG |
| TSYHIHWVRQAPGK | CTTCTGGATACACCTTCACTAGCTATCATATACATT |
| GLEWVGWIYPGNVN | GGGTGCGCCAGGCCCCCGGAAAAGGGCTTGAGTG |
| TEYNEKFKGRFTISR | GGTGGGATGGATCTACCCTGGCAATGTTAACACAG |
| DDSKNTLYLQMNSL | AATATAATGAGAAGTTCAAGGGCAGATTCACCATT |
| KTEDTAVYYCAREEI | AGCAGGGACGATTCCAAGAACACACTCTACCTGCA |
| TYAMDYWGQGTTV | GATGAACAGCCTGAAAACTGAAGACACGGCTGTGT |
| TVSSGGGGSGGGGS | ATTACTGTGCGAGGGAGGAAATTACCTACGCTATG |
| GGGGSGGDIQMTQS | GACTACTGGGGCCAGGGAACCACAGTCACCGTGTC |
| PSSLSASVGDRVTITC | CTCAGGCGGAGGTGGAAGCGGAGGGGGAGGATCT |
| RSSQSIVHSNGNTYL | GGCGGCGGAGGAAGCGGAGGCGACATTCAAATGA |
| EWYQQKPGKAPKLL | CCCAGAGCCCATCCAGCCTGAGCGCATCTGTAGGT |
| IYKVSNRFSGVPSRFS | GACCGGGTCACCATCACTTGTAGATCCAGTCAGAG |
| GSGSGTDFTLTISSLQ | TATTGTACACAGTAATGGGAACACCTATTTGGAAT |
| PEDFATYYCFQGSHV | GGTATCAGCAGAAACCAGGTAAAGCCCCAAAATT |
| PRTFGGGTKVEIK | GCTCATCTACAAAGTCTCTAACAGATTTAGTGGTG |
| (SEQ ID NO: 33) | TACCAAGCAGGTTCAGCGGTTCCGGAAGTGGTACT |
| | GATTTCACCCTCACGATCTCCTCTCTCCAGCCAGAA |
| | GATTTCGCCACTTATTACTGTTTTCAAGGTTCACAT |
| | GTGCCGCGCACATTCGGTGGGGGTACTAAAGTAGA |
| | AATCAAA (SEQ ID NO: 551) |
| QVQLVQSGAEVKKP | CAGGTGCAGCTGGTGCAGTCTGGGGCTGAGGTGAA |
| GSSVKVSCKASGYTF | GAAGCCTGGGTCCTCAGTGAAGGTTTCCTGCAAGG |
| TSYHIHWVRQAPGQ | CTTCTGGATACACCTTCACTAGCTATCATATACATT |
| GLEWIGWIYPGNVN | GGGTGCGCCAGGCCCCCGGACAAGGGCTTGAGTG |
| TEYNEKFKGKATITA | GATCGGATGGATCTACCCTGGCAATGTTAACACAG |
| DESTNTAYMELSSLR | AATATAATGAGAAGTTCAAGGGCAAAGCCACCATT |
| SEDTAVYYCAREEIT | ACCGCGGACGAATCCACGAACACAGCCTACATGG |
| YAMDYWGQGTLVT | AGCTGAGCAGCCTGAGATCTGAAGACACGGCTGTG |
| VSSGGGGSGGGGSG | TATTACTGTGCGAGGGAGGAAATTACCTACGCTAT |
| GGGSGGDIQMTQSPS | GGACTACTGGGGCCAGGGAACCCTGGTCACCGTGT |
| TLSASVGDRVTITCR | CCTCAGGCGGAGGTGGAAGCGGAGGGGGAGGATC |
| SSQSIVHSNGNTYLE | TGGCGGCGGAGGAAGCGGAGGCGACATTCAAATG |
| WYQQKPGKAPKLLI | ACCCAGAGCCCATCCACCCTGAGCGCATCTGTAGG |
| YKVSNRFSGVPARFS | TGACCGGGTCACCATCACTTGTAGATCCAGTCAGA |
| GSGSGTEFTLTISSLQ | GTATTGTACACAGTAATGGGAACACCTATTTGGAA |
| PDDFATYYCFQGSH | TGGTATCAGCAGAAACCAGGTAAAGCCCCAAAATT |
| VPRTFGQGTKVEVK | GCTCATCTACAAAGTCTCTAACAGATTTAGTGGTG |
| (SEQ ID NO: 34) | TACCAGCCAGGTTCAGCGGTTCCGGAAGTGGTACT |
| | GAATTCACCCTCACGATCTCCTCTCTCCAGCCAGAT |
| | GATTTCGCCACTTATTACTGTTTTCAAGGTTCACAT |
| | GTGCCGCGCACATTCGGTCAGGGTACTAAAGTAGA |
| | AGTCAAA (SEQ ID NO: 552) |
| QVQLVQSGAEVKKP | CAGGTGCAGCTGGTGCAGTCTGGGGCTGAGGTGAA |
| GSSVKVSCKASGYTF | GAAGCCTGGGTCCTCAGTGAAGGTTTCCTGCAAGG |
| TSYHMHWVRQAPG | CTTCTGGATACACCTTCACTAGCTATCATATGCATT |
| QGLEWIGYIYPGNVN | GGGTGCGCCAGGCCCCCGGACAAGGGCTTGAGTG |
| TEYNEKFKGKATLT | GATCGGATACATCTACCCTGGCAATGTTAACACAG |
| ADKSTNTAYMELSSL | AATATAATGAGAAGTTCAAGGGCAAAGCCACCCTT |
| RSEDTAVYFCAREEI | ACCGCGGACAAATCCACGAACACAGCCTACATGG |
| TYAMDYWGQGTLV | AGCTGAGCAGCCTGAGATCTGAAGACACGGCTGTG |
| TVSSGGGGSGGGGS | TATTTCTGTGCGAGGGAGGAAATTACCTACGCTAT |
| GGGGSGGDVQMTQS | GGACTACTGGGGCCAGGGAACCCTGGTCACCGTGT |
| PSTLSASVGDRVTITC | CCTCAGGCGGAGGTGGAAGCGGAGGGGGAGGATC |
| SSSQSIVHSNGNTYM | TGGCGGCGGAGGAAGCGGAGGCGACGTTCAAATG |
| EWYQQKPGKAPKLL | ACCCAGAGCCCATCCACCCTGAGCGCATCTGTAGG |
| IYKVSNRFSGVPDRF | TGACCGGGTCACCATCACTTGTAGCTCCAGTCAGA |
| SGSGSGTEFTLTISSL | GTATTGTACACAGTAATGGGAACACCTATATGGAA |
| QPDDFATYYCHQGS | TGGTATCAGCAGAAACCAGGTAAAGCCCCAAAATT |
| HVPRTFGQGTKVEV | GCTCATCTACAAAGTCTCTAACAGATTTAGTGGTG |
| K (SEQ ID NO: 35) | TACCAGACAGGTTCAGCGGTTCCGGAAGTGGTACT |
| | GAATTCACCCTCACGATCTCCTCTCTCCAGCCAGAT |
| | GATTTCGCCACTTATTACTGTCATCAAGGTTCACAT |
| | GTGCCGCGCACATTCGGTCAGGGTACTAAAGTAGA |
| | AGTCAAA (SEQ ID NO: 553) |
| QVQLQQSGPELVKP | CAGGTGCAGCTGCAGCAGTCTGGGCCTGAGCTGGT |
| GASVKMSCKASGYT | GAAGCCTGGGGCCTCAGTGAAGATGTCCTGCAAGG |
| FTSYHIQWVKQRPG | CTTCTGGATACACCTTCACTAGCTATCATATCCAGT |
| QGLEWIGWIYPGDGS | GGGTGAAGCAGAGGCCTGGACAAGGGCTTGAGTG |
| TQYNEKFKGKTTLT | GATCGGATGGATCTACCCTGGCGATGGTAGTACAC |
| ADKSSSTAYMLLSSL | AGTATAATGAGAAGTTCAAGGGCAAAACCACCCTT |
| TSEDSAIYFCAREGT | ACCGCGGACAAATCCTCCAGCACAGCCTACATGTT |
| YYAMDYWGQGTSV | GCTGAGCAGCCTGACCTCTGAAGACTCTGCTATCT |
| TVSSGGGGSGGGGS | ATTTCTGTGCGAGGGAGGGGACCTACTACGCTATG |
| GGGGSGGDVLMTQT | GACTACTGGGGCCAGGGAACCTCAGTCACCGTGTC |
| PLSLPVSLGDQVSISC | CTCAGGCGGAGGTGGAAGCGGAGGGGGAGGATCT |
| RSSQSIVHSNGNTYL | GGCGGCGGAGGAAGCGGAGGCGATGTTTTGATGA |
| EWYLQKPGQSPKLLI | CCCAGACTCCACTCTCCCTGCCTGTCTCTCTTGGAG |
| YKVSNRFSGVPDRFS | ACCAAGTCTCCATCTCTTGTAGATCCAGTCAGAGT |
| GSGSGTDFTLKISRV | ATTGTACACAGTAATGGGAACACCTATTTAGAATG |
| EAEDLGVYYCFQGS | GTATCTGCAGAAACCAGGTCAGTCTCCAAAGTTGC |
| HVPRTFGGGTKLEIK | TCATCTACAAAGTCTCTAACAGATTTAGTGGTGTA |
| (SEQ ID NO: 36) | CCAGACAGGTTCAGCGGTTCCGGAAGTGGTACTGA |
| | TTTCACCCTCAAGATCTCGAGAGTGGAGGCTGAGG |
| | ATCTGGGAGTTTATTACTGTTTTCAAGGTTCACATG |
| | TGCCGCGCACATTCGGTGGAGGTACTAAACTGGAA |
| | ATCAAA (SEQ ID NO: 554) |
| QLQLQESGPGLVKPS | CAGCTGCAGCTGCAGGAGTCTGGGCCCGGGCTGGT |
| ETLSLTCTVSGYTFTS | GAAGCCTTCGGAAACGCTGAGCCTCACCTGCACGG |
| YHIQWIRQPPGKGLE | TTTCTGGATACACCTTCACCAGCTATCATATCCAGT |
| WIGWIYPGDGSTQY | GGATCCGACAGCCCCCTGGAAAAGGGCTTGAGTGG |
| NEKFKGRATISVDTS | ATCGGATGGATCTACCCTGGCGATGGTTCAACACA |
| KNQFSLNLDSVSAAD | GTACAATGAGAAGTTCAAGGGCAGAGCCACGATT |
| TAIYYCAREGTYYA | AGCGTGGACACATCCAAGAACCAATTCTCCCTGAA |
| MDYWGKGSTVTVSS | CCTGGACAGCGTGAGTGCTGCGGACACGGCCATTT |
| GGGGSGGGGSGGGG | ATTACTGTGCGAGAGAGGGAACTTACTACGCTATG |
| SGGDIQMTQSPSSLS | GACTACTGGGGCAAAGGGAGCACGGTCACCGTGTC |
| ASVGDRVTITCRSSQ | CTCAGGCGGAGGTGGAAGCGGAGGGGGAGGATCT |
| SIVHSNGNTYLEWY | GGCGGCGGAGGAAGCGGAGGCGACATCCAGATGA |
| QQKPGKAPKLLIYKV | CCCAGAGCCCAAGCTCCCTGAGTGCGTCCGTGGGC |
| SNRFSGVPSRFSGSGS | GACCGCGTGACCATCACTTGCAGATCCTCTCAGTC |
| GTDFTFTISSLQPEDI | CATCGTGCACTCCAACGGCAACACGTACCTCGAGT |
| ATYYCFQGSHVPRTF | GGTACCAGCAGAAGCCCGGGAAGGCCCCGAAACT |
| GPGTKVDIK (SEQ ID | GCTCATCTACAAGGTGAGCAACCGGTTCTCCGGCG |
| NO: 37) | TCCCCAGCCGCTTCTCAGGGTCCGGCTCGGGGACG |
| | GATTTCACCTTCACGATTAGCAGCTTGCAGCCCGA |
| | AGACATCGCCACGTACTACTGCTTTCAGGGAAGTC |
| | ACGTGCCGCGTACCTTCGGGCCGGGCACGAAAGTG |
| | GATATTAAG (SEQ ID NO: 555) |
| EVQLVQSGAELKKP | GAGGTGCAGCTGGTGCAGTCTGGGGCCGAGCTGAA |
| GSSVKVSCKASGYTF | GAAGCCTGGGTCCTCGGTGAAGGTGTCCTGCAAGG |
| TSYHIQWVKQAPGQ | CTTCTGGATACACCTTCACCAGCTATCATATCCAGT |
| GLEWIGWIYPGDGST | GGGTAAAACAGGCCCCTGGACAAGGGCTTGAGTG |
| QYNEKFKGKATLTV | GATCGGATGGATCTACCCTGGCGATGGTTCAACAC |
| DKSTNTAYMELSSLR | AGTACAATGAGAAGTTCAAGGGCAAAGCCACGCTT |
| SEDTAVYYCAREGT | ACCGTGGACAAATCCACGAACACAGCCTACATGGA |
| YYAMDYWGQGTLV | GCTGAGCAGCCTGAGATCTGAGGACACGGCCGTAT |
| TVSSGGGGSGGGGS | ATTACTGTGCGAGAGAGGGAACTTACTACGCTATG |
| GGGGSGGDIQMTQS | GACTACTGGGGCCAAGGGACCCTGGTCACCGTGTC |
| PSTLSASVGDRVTITC | CTCAGGCGGAGGTGGAAGCGGAGGGGGAGGATCT |
| RSSQSIVHSNGNTYL | GGCGGCGGAGGAAGCGGAGGCGACATCCAGATGA |
| EWYQQKPGKAPKLL | CCCAGAGCCCATCCACCCTGAGTGCGTCCGTGGGC |
| IYKVSNRFSGVPSRFS | GACCGCGTGACCATCACTTGCAGATCCTCTCAGTC |
| GSGSGTDFTLTISSLQ | CATCGTGCACTCCAACGGCAACACGTACCTCGAGT |
| PDDFATYYCFQGSH | GGTACCAGCAGAAGCCCGGGAAGGCCCCGAAACT |
| VPRTFGQGTKVEVK | GCTCATCTACAAGGTGAGCAACCGGTTCTCCGGCG |
| (SEQ ID NO: 38) | TCCCCAGCCGCTTCTCAGGGTCCGGCTCGGGGACG |
| | GATTTCACCCTCACGATTAGCAGCTTGCAGCCCGA |
| | TGACTTCGCCACGTACTACTGCTTTCAGGGAAGTC |
| | ACGTGCCGCGTACCTTCGGGCAGGGCACGAAAGTG |
| | GAAGTTAAG (SEQ ID NO: 556) |
| QVQLVQSGAEVKKP | CAGGTGCAGCTGGTGCAGTCTGGGGCCGAGGTGAA |
| GSSVKVSCKASGYTF | GAAGCCTGGGTCCTCGGTGAAGGTGTCCTGCAAGG |
| TSYHIQWVRQAPGQ | CTTCTGGATACACCTTCACCAGCTATCATATCCAGT |
| GLEWMGWIYPGDGS | GGGTACGACAGGCCCCTGGACAAGGGCTTGAGTG |
| TQYNEKFKGRVTITA | GATGGGATGGATCTACCCTGGCGATGGTTCAACAC |
| DKSTSTAYMELSSLR | AGTACAATGAGAAGTTCAAGGGCAGAGTCACGATT |
| SEDTAVYYCAREGT | ACCGCGGACAAATCCACGAGCACAGCCTACATGG |
| YYAMDYWGQGTTV | AGCTGAGCAGCCTGAGATCTGAGGACACGGCCGTA |
| TVSSGGGGSGGGGS | TATTACTGTGCGAGAGAGGGAACTTACTACGCTAT |
| GGGGSGGEIVLTQSP | GGACTACTGGGGCCAAGGGACCACGGTCACCGTGT |
| GTLSLSPGERATLSC | CCTCAGGCGGAGGTGGAAGCGGAGGGGGAGGATC |
| RSSQSIVHSNGNTYL | TGGCGGCGGAGGAAGCGGAGGCGAGATCGTCCTG |
| EWYQQKPGQAPRLLI | ACCCAGAGCCCAGGGACCCTGAGTTTGTCCCCGGG |
| YKVSNRFSGIPDRFS | CGAGCGCGCGACCCTCAGTTGCAGATCCTCTCAGT |
| GSGSGTDFTLTISRLE | CCATCGTGCACTCCAACGGCAACACGTACCTCGAG |
| PEDFAVYYCFQGSH | TGGTACCAGCAGAAGCCCGGGCAGGCCCCGCGACT |
| VPRTFGGGTKVEIK | GCTCATCTACAAGGTGAGCAACCGGTTCTCCGGCA |
| (SEQ ID NO: 39) | TCCCCGACCGCTTCTCAGGGTCCGGCTCGGGGACG |
| | GATTTCACCCTCACGATTAGCCGCTTGGAGCCCGA |
| | AGACTTCGCCGTGTACTACTGCTTTCAGGGAAGTC |
| | ACGTGCCGCGTACCTTCGGGGGGGGCACGAAAGTG |
| | GAAATTAAG (SEQ ID NO: 557) |
| QVTLKQSGAEVKKP | CAGGTGACCCTGAAGCAGTCTGGGGCCGAGGTGA |
| GSSVKVSCTASGYTF | AGAAGCCTGGGTCCTCGGTGAAGGTGTCCTGCACG |
| TSYHVSWVRQAPGQ | GCTTCTGGATACACCTTCACCAGCTATCATGTCAGC |
| GLEWLGRIYPGDGST | TGGGTACGACAGGCCCCTGGACAAGGGCTTGAGTG |
| QYNEKFKGKVTITAD | GTTGGGAAGGATCTACCCTGGCGATGGTTCAACAC |
| KSMDTSFMELTSLTS | AGTACAATGAGAAGTTCAAGGGCAAAGTCACGATT |
| EDTAVYYCAREGTY | ACCGCGGACAAATCCATGGACACATCCTTCATGGA |
| YAMDLWGQGTLVT | GCTGACCAGCCTGACATCTGAGGACACGGCCGTAT |
| VSSGGGGSGGGGSG | ATTACTGTGCGAGAGAGGGAACTTACTACGCTATG |
| GGGSGGEIVLTQSPG | GACCTCTGGGGCCAAGGGACCCTGGTCACCGTGTC |
| TLSLSPGERATLSCRS | CTCAGGCGGAGGTGGAAGCGGAGGGGGAGGATCT |
| SQSIVHSNGNTYLAW | GGCGGCGGAGGAAGCGGAGGCGAGATCGTCCTGA |
| YQQKPGQAPRLLISK | CCCAGAGCCCAGGGACCCTGAGTTTGTCCCCGGGC |
| VSNRFSGVPDRFSGS | GAGCGCGCGACCCTCAGTTGCAGATCCTCTCAGTC |
| GSGTDFTLTISRLEPE | CATCGTGCACTCCAACGGCAACACGTACCTCGCGT |
| DFAVYYCQQGSHVP | GGTACCAGCAGAAGCCCGGGCAGGCCCCGCGACT |
| RTFGGGTKVEIK | GCTCATCTCCAAGGTGAGCAACCGGTTCTCCGGCG |
| (SEQ ID NO: 40) | TCCCCGACCGCTTCTCAGGGTCCGGCTCGGGGACG |
| | GATTTCACCCTCACGATTAGCCGCTTGGAGCCCGA |
| | AGACTTCGCCGTGTACTACTGCCAACAGGGAAGTC |
| | ACGTGCCGCGTACCTTCGGGGGGGGCACGAAAGTG |
| | GAAATTAAG (SEQ ID NO: 558) |
| QVQLVQSGAEVKKP | CAGGTGCAGCTGGTGCAGTCTGGGGCCGAGGTGAA |
| GASVKVSCKASGYT | GAAGCCTGGGGCCTCGGTGAAGGTGTCCTGCAAGG |
| FTSYHMHWVRQAPG | CTTCTGGATACACCTTCACCAGCTATCATATGCACT |
| QRLEWMGWIYPGDG | GGGTACGACAGGCCCCTGGACAAAGGCTTGAGTG |
| STQYNEKFKGKVTIT | GATGGGATGGATCTACCCTGGCGATGGTTCAACAC |
| RDTSASTAYMELSSL | AGTACAATGAGAAGTTCAAGGGCAAAGTCACGATT |
| RSEDTAVYYCAREG | ACCCGGGACACATCCGCGAGCACAGCCTACATGGA |
| TYYAMDYWGQGTL | GCTGAGCAGCCTGAGATCTGAGGACACGGCCGTAT |
| VTVSSGGGGSGGGG | ATTACTGTGCGAGAGAGGGAACTTACTACGCTATG |
| SGGGGSGGDIVMTQ | GACTACTGGGGCCAAGGGACCCTGGTCACCGTGTC |
| TPLSLPVTPGEPASIS | CTCAGGCGGAGGTGGAAGCGGAGGGGGAGGATCT |
| CRSSQSIVHSNGNTY | GGCGGCGGAGGAAGCGGAGGCGACATCGTCATGA |
| LDWYLQKPGQSPQL | CCCAGACCCCACTGTCCCTGCCTGTGACCCCGGGC |
| LIYKVSNRFSGVPDR | GAGCCCGCGAGCATCAGTTGCAGATCCTCTCAGTC |
| FSGSGSGTDFTLKISR | CATCGTGCACTCCAACGGCAACACGTACCTCGACT |
| VEAEDVGVYYCMQ | GGTACCTGCAGAAGCCCGGGCAGTCCCCGCAACTG |
| GSHVPRTFGGGTKVE | CTCATCTACAAGGTGAGCAACCGGTTCTCCGGCGT |
| IK (SEQ ID NO: 41) | CCCCGACCGCTTCTCAGGGTCCGGCTCGGGGACGG |
| | ATTTCACCCTCAAGATTAGCCGCGTGGAGGCCGAA |
| | GACGTCGGCGTGTACTACTGCATGCAGGGAAGTCA |
| | CGTGCCGCGTACCTTCGGGGGGGGCACGAAAGTGG |
| | AAATTAAG (SEQ ID NO: 559) |

HLA-B*07 antigen binding domains

| | |
|---|---|
| 1.10_scFv | QVQLQESGPGLVKPSQTLSLTCTVSGYSITSGYSWHW |
| | IRQPPGKGLEWIGYIHFSGSTHYHPSLKSRVTISVDTS |
| | KNQFSLKLSSVTAADTAVYYCARGGVVSHYAMDCW |
| | GQGTTVTVSSGGGGSGGGGSGGGGSGGDIQMTQSPS |
| | SLSASVGDRVTITCRASENIYSNLAWYQQKPGKAPKL |
| | LIYAATYLPDGVPSRFSGSGSGTDFTLTISSLQPEDFA |
| | TYYCQHFWVTPYTFGGGTKVEIK (SEQ ID NO: 560) |
| 1.9_scFv | EVQLVESGGGLVKPGGSLRLSCAASGYSITSGYSWH |
| | WVRQAPGKGLEWVSYIHFSGSTHYHPSLKSRFTISRD |
| | NAKNSLYLQMNSLRAEDTAVYYCARGGVVSHYAM |
| | DCWGQGTTVTVSSGGGGSGGGGSGGGGSGGDIQMT |
| | QSPSSVSASVGDRVTITCRASENIYSNLAWYQQKPGK |
| | APKLLIYAATYLPDGVPSRFSGSGSGTDFTLTISSLQP |
| | EDFATYYCQHFWVTPYTFGGGTKVEIK (SEQ ID NO: |
| | 561) |
| 1.8_scFv | EVQLVESGGGLVKPGGSLRLSCAASGYSITSGYSWH |
| | WVRQAPGKGLEWVGYIHFSGSTHYHPSLKSRFTISRD |
| | DSKNTLYLQMNSLKTEDTAVYYCARGGVVSHYAMD |
| | CWGQGTTVTVSSGGGGSGGGGSGGGGSGGEIVLTQS |
| | PATLSLSPGERATLSCRASENIYSNLAWYQQKPGQAP |
| | RLLIYAATYLPDGIPARFSGSGSGTDFTLTISSLEPEDF |
| | AVYYCQHFWVTPYTFGGGTKVEIK (SEQ ID NO: 562) |
| 1.7_scFv | QVQLQQSGPGLVKPSQTLSLTCAISGYSITSGYSWHW |
| | IRQSPSRGLEWLGYIHFSGSTHYHPSLKSRITINPDTSK |
| | NQFSLQLNSVTPEDTAVYYCARGGVVSHYAMDCWG |
| | QGTTVTVSSGGGGSGGGGSGGGGSGGEIVLTQSPAT |
| | LSLSPGERATLSCRASENIYSNLAWYQQKPGQAPRLL |
| | IYAATYLPDGIPARFSGSGSGTDFTLTISRLEPEDFAVY |
| | YCQHFWVTPYTFGGGTKVEIK (SEQ ID NO: 563) |
| 1.6_scFv | EVQLVESGGGLVKPGGSLRLSCAASGYSITSGYSWH |
| | WVRQAPGKGLEWVGYIHFSGSTHYHPSLKSRFTISRD |
| | DSKNTLYLQMNSLKTEDTAVYYCARGGVVSHYAMD |
| | CWGQGTTVTVSSGGGGSGGGGSGGGGSGGDIQMTQ |
| | SPSSVSASVGDRVTITCRASENIYSNLAWYQQKPGKA |
| | PKLLIYAATYLPDGVPSRFSGSGSGTDFTLTISSLQPE |
| | DFATYYCQHFWVTPYTFGGGTKVEIK (SEQ ID NO: |
| | 564) |
| 1.5_scFv | EVQLVESGGGLVQPGGSLRLSCAASGYSITSGYSWH |
| | WVRQAPGKGLEWVSYIHFSGSTHYHPSLKSRFTISRD |
| | NSKNTLYLQMNSLRAEDTAVYYCARGGVVSHYAM |
| | DCWGQGTTVTVSSGGGGSGGGGSGGGGSGGDIQMT |
| | QSPSSLSASVGDRVTITCRASENIYSNLAWYQQKPGK |
| | APKLLIYAATYLPDGVPSRFSGSGSGTDFTLTISSLQP |
| | EDFATYYCQHFWVTPYTFGGGTKVEIK (SEQ ID NO: |
| | 565) |
| 1.4_scFv | EVQLVESGGGLVKPGGSLRLSCAASGYSITSGYSWH |
| | WVRQAPGKGLEWVGYIHFSGSTHYHPSLKSRFTISRD |
| | DSKNTLYLQMNSLKTEDTAVYYCARGGVVSHYAMD |
| | CWGQGTTVTVSSGGGGSGGGGSGGGGSGGDIQMTQ |
| | SPSSLSASVGDRVTITCRASENIYSNLAWYQQKPGKA |
| | PKLLIYAATYLPDGVPSRFSGSGSGTDFTLTISSLQPE |
| | DFATYYCQHFWVTPYTFGGGTKVEIK (SEQ ID NO: |
| | 566) |
| 1.3_scFv | QVQLQQWGAGLLKPSETLSLTCAVYGYSITSGYSWH |
| | WIRQPPGKGLEWIGYIHFSGSTHYHPSLKSRVTISVDT |
| | SKNQFSLKLSSVTAADTAVYYCARGGVVSHYAMDC |
| | WGQGTTVTVSSGGGGSGGGGSGGGGSGGDIQMTQS |
| | PSSLSASVGDRVTITCRASENIYSNLAWYQQKPGKAP |
| | KLLIYAATYLPDGVPSRFSGSGSGTDFTLTISSLQPED |
| | FATYYCQHFWVTPYTFGGGTKVEIK (SEQ ID NO: |
| | 567) |
| 1.2_scFv | QVQLQESGPGLVKPSQTLSLTCTVSGYSITSGYSWHW |
| | IRQHPGKGLEWIGYIHFSGSTHYHPSLKSRVTISVDTS |
| | KNQFSLKLSSVTAADTAVYYCARGGVVSHYAMDCW |
| | GQGTTVTVSSGGGGSGGGGSGGGGSGGDIQMTQSPS |
| | SLSASVGDRVTITCRASENIYSNLAWYQQKPGKAPKL |
| | LIYAATYLPDGVPSRFSGSGSGTDFTLTISSLQPEDFA |
| | TYYCQHFWVTPYTFGGGTKVEIK (SEQ ID NO: 568) |
| 1.1_scFv | QVQLQQSGPGLVKPSQTLSLTCAISGYSITSGYSWHW |
| | IRQSPSRGLEWLGYIHFSGSTHYHPSLKSRITINPDTSK |
| | NQFSLQLNSVTPEDTAVYYCARGGVVSHYAMDCWG |
| | QGTTVTVSSGGGGSGGGGSGGGGSGGDIQMTQSPSS |
| | LSASVGDRVTITCRASENIYSNLAWYQQKPGKAPKLL |
| | IYAATYLPDGVPSRFSGSGSGTDFTLTISSLQPEDFAT |
| | YYCQHFWVTPYTFGGGTKVEIK (SEQ ID NO: 569) |

HLA-A*11 antigen binding domains

| | |
|---|---|
| QVQLQESGPGLVKPS | CAGGTGCAGCTGCAGGAAAGCGGCCCTGGCCTGGT |
| QTLSLTCTVSGGSISS | GAAACCCAGCCAGACCCTGAGCCTGACCTGCACAG |
| GGYYWSWIRQPPGK | TGTCCGGCGGCTCGATCAGCAGCGGCGGCTACTAC |
| GLEWIGYIYYSGSTY | TGGTCCTGGATCAGACAGCCCCCTGGCAAGGGCCT |
| YNPSLKSRVTISVDTS | GGAATGGATCGGCTACATCTACTACAGCGGCAGCA |
| KNQFSLKLSSVTAAD | CCTACTACAACCCCAGCCTGAAGTCCAGAGTGACC |
| TAVYYCARHYYYYS | ATCAGCGTGGACACCAGCAAGAACCAGTTCAGCCT |
| MDVWGKGTTVTVSS | GAAGCTGAGCAGCGTGACAGCCGCCGACACCGCT |
| GGGGSGGGGSGGGG | GTGTATTACTGTGCGAGACACTACTACTACTACTCC |
| SGGDIQMTQSPSSLS | ATGGACGTCTGGGGCAAAGGGACCACGGTCACCGT |
| ASVGDRVTITCRASQ | GTCCTCAGGCGGAGGTGGAAGCGGAGGGGGAGGA |
| SISSYLNWYQQKPGK | TCTGGCGGCGGAGGAAGCGGAGGCGACATCCAGA |
| APKLLIYAASSLQSG | TGACCCAGTCTCCATCCTCCCTGTCTGCATCTGTAG |
| VPSRFSGSGSGTDFT | GAGACAGAGTCACCATCACTTGCCGGGCAAGTCAG |
| LTISSLQPEDFATYYC | AGCATTAGCAGCTATTTAAATTGGTATCAGCAGAA |
| QQSYSTPLTFGGGTK | ACCAGGGAAAGCCCCTAAGCTCCTGATCTATGCTG |
| VEIK (SEQ ID NO: | CATCCAGTTTGCAAAGTGGGGTCCCATCAAGGTTC |
| 114) | AGTGGCAGTGGATCTGGGACAGATTTCACTCTCAC |
| | CATCAGCAGTCTGCAACCTGAAGATTTTGCAACTT |
| | ACTACTGTCAACAGAGTTACAGTACCCCTCTCACTT |
| | TCGGCGGCGGAACAAAGGTGGAGATCAAG (SEQ ID |
| | NO: 123) |
| QITLKESGPTLVKPT | CAGATCACCCTGAAAGAGTCCGGCCCCACCCTGGT |
| QTLTLTCTFSGFSLST | GAAACCCACCCAGACCCTGACCCTGACATGCACCT |
| SGVGVGWIRQPPGK | TCAGCGGCTTCAGCCTGAGCACCTCTGGCGTGGGC |
| ALEWLALIYWNDDK | GTGGGCTGGATCAGACAGCCTCCCGGCAAGGCCCT |
| RYSPSLKSRLTITKDT | GGAATGGCTGGCCCTGATCTACTGGAACGACGACA |
| SKNQVVLTMTNMDP | AGCGGTACAGCCCCAGCCTGAAGTCCCGGCTGACC |
| VDTATYYCAHRHMR | ATCACCAAGGACACCTCGAAGAACCAGGTGGTGCT |
| LSCFDYWGQGTLVT | GACCATGACAAACATGGACCCCGTGGACACCGCCA |
| VSSGGGGSGGGGSG | CATATTACTGTGCACACAGACACATGCGTTTAAGC |
| GGGSGGDIQMTQSPS | TGTTTTGACTACTGGGGCCAGGGAACCCTGGTCAC |
| SLSASVGDRVTITCR | CGTGTCCTCAGGCGGAGGTGGAAGCGGAGGGGGA |
| ASQSISSYLNWYQQK | GGATCTGGCGGCGGAGGAAGCGGAGGCGACATCC |
| PGKAPKLLIYAASSL | AGATGACCCAGTCTCCATCCTCCCTGTCTGCATCTG |
| QSGVPSRFSGSGSGT | TAGGAGACAGAGTCACCATCACTTGCCGGGCAAGT |
| DFTLTISSLQPEDFAT | CAGAGCATTAGCAGCTATTTAAATTGGTATCAGCA |
| YYCQQSYSTPLTFGG | GAAACCAGGGAAAGCCCCTAAGCTCCTGATCTATG |
| GTKVEIK (SEQ ID | CTGCATCCAGTTTGCAAAGTGGGGTCCCATCAAGG |
| NO: 115) | TTCAGTGGCAGTGGATCTGGGACAGATTTCACTCT |
| | CACCATCAGCAGTCTGCAACCTGAAGATTTTGCAA |
| | CTTACTACTGTCAACAGAGTTACAGTACCCCTCTCA |
| | CTTTCGGCGGCGGAACAAAGGTGGAGATCAAG |
| | (SEQ ID NO: 124) |
| QVQLVQSGAEVKKP | CAGGTGCAGCTGGTGCAGTCTGGCGCCGAAGTGAA |
| GASVKVSCKASGYT | GAAACCTGGCGCCTCCGTGAAGGTGTCCTGCAAGG |
| FTSYAMHWVRQAPG | CCAGCGGCTACACCTTCACCAGCTACGCCATGCAC |
| QRLEWMGWINAGN | TGGGTTCGACAGGCCCCTGGCCAGAGACTGGAATG |
| GNTKYSQKFQGRVTI | GATGGGCTGGATCAACGCCGGCAACGGCAACACC |
| TRDTSASTAYMELSS | AAGTACAGCCAGAAATTCCAGGGCAGAGTGACCA |
| LRSEDTAVYYCARE | TCACCCGGGACACCAGCGCCAGCACCGCCTACATG |
| GNGANPDAFDIWGQ | GAACTGAGCAGCCTGCGGAGCGAGGACACCGCTG |
| GTMVTVSSGGGGSG | TGTATTACTGTGCGAGAGAAGGAAATGGTGCCAAC |
| GGGSGGGGSGGDIQ | CCTGATGCTTTTGATATCTGGGGCCAAGGGACAAT |
| MTQSPSSLSASVGDR | GGTCACCGTGTCCTCAGGCGGAGGTGGAAGCGGA |
| VTITCRASQSISSYLN | GGGGGAGGATCTGGCGGCGGAGGAAGCGGAGGCG |
| WYQQKPGKAPKLLI | ACATCCAGATGACCCAGTCTCCATCCTCCCTGTCTG |
| YAASSLQSGVPSRFS | CATCTGTAGGAGACAGAGTCACCATCACTTGCCGG |
| GSGSGTDFTLTISSLQ | GCAAGTCAGAGCATTAGCAGCTATTTAAATTGGTA |
| PEDFATYYCQQSYST | TCAGCAGAAACCAGGGAAAGCCCCTAAGCTCCTGA |
| PLTFGGGTKVEIK | TCTATGCTGCATCCAGTTTGCAAAGTGGGGTCCCA |
| (SEQ ID NO: 116) | TCAAGGTTCAGTGGCAGTGGATCTGGGACAGATTT |
| | CACTCTCACCATCAGCAGTCTGCAACCTGAAGATT |
| | TTGCAACTTACTACTGTCAACAGAGTTACAGTACC |
| | CCTCTCACTTTCGGCGGCGGAACAAAGGTGGAGAT |
| | CAAG(SEQ ID NO: 125) |
| EVQLVESGGGLVQP | GAAGTGCAGCTGGTGGAAAGCGGCGGAGGCCTGG |
| GGSLRLSCAASGFTF | TGCAGCCTGGCGGCAGCCTGAGACTGTCTTGCGCC |
| SSYDMHWVRQATG | GCCAGCGGCTTCACCTTCAGCAGCTACGACATGCA |
| KGLEWVSAIGTAGD | CTGGGTCCGCCAGGCCACCGGCAAGGGACTGGAAT |
| TYYPGSVKGRFTISR | GGGTGTCCGCCATCGGCACAGCCGGCGACACTTAC |
| ENAKNSLYLQMNSL | TACCCCGGCAGCGTGAAGGGCCGGTTCACCATCAG |
| RAGDTAVYYCARDL | CAGAGAGAACGCCAAGAACAGCCTGTACCTGCAG |
| PGSYWYFDLWGRGT | ATGAACAGCCTTCGAGCCGGCGATACCGCCGTGTA |
| LVTVSSGGGGSGGG | TTACTGTGCAAGAGATCTCCCTGGTAGCTACTGGT |
| GSGGGGSGGDIQMT | ACTTCGATCTCTGGGGCCGTGGCACCCTGGTCACT |
| QSPSSLSASVGDRVTI | GTGTCCTCAGGCGGAGGTGGAAGCGGAGGGGGAG |
| TCRASQSISSYLNWY | GATCTGGCGGCGGAGGAAGCGGAGGCGACATCCA |
| QQKPGKAPKLLIYAA | GATGACCCAGTCTCCATCCTCCCTGTCTGCATCTGT |
| SSLQSGVPSRFSGSGS | AGGAGACAGAGTCACCATCACTTGCCGGGCAAGTC |
| GTDFTLTISSLQPEDF | AGAGCATTAGCAGCTATTTAAATTGGTATCAGCAG |
| ATYYCQQSYSTPLTF | AAACCAGGGAAAGCCCCTAAGCTCCTGATCTATGC |
| GGGTKVEIK (SEQ ID | TGCATCCAGTTTGCAAAGTGGGGTCCCATCAAGGT |
| NO: 117) | TCAGTGGCAGTGGATCTGGGACAGATTTCACTCTC |
| | ACCATCAGCAGTCTGCAACCTGAAGATTTTGCAAC |
| | TTACTACTGTCAACAGAGTTACAGTACCCCTCTCAC |
| | TTTCGGCGGCGGAACAAAGGTGGAGATCAAG (SEQ |
| | ID NO: 126) |
| QVQLQESGPGLVKPS | CAGGTGCAGCTGCAGGAAAGCGGCCCTGGCCTGGT |
| QTLSLTCTVSGGSISS | GAAACCCAGCCAGACCCTGAGCCTGACCTGCACAG |
| GGYYWSWIRQPPGK | TGTCCGGCGGCTCGATCAGCAGCGGCGGCTACTAC |
| GLEWIGYIYYSGSTY | TGGTCCTGGATCAGACAGCCCCCTGGCAAGGGCCT |
| YNPSLKSRVTISVDTS | GGAATGGATCGGCTACATCTACTACAGCGGCAGCA |
| KNQFSLKLSSVTAAD | CCTACTACAACCCCAGCCTGAAGTCCAGAGTGACC |
| TAVYYCARHYYYYY | ATCAGCGTGGACACCAGCAAGAACCAGTTCAGCCT |
| LDVWGKGTTVTVSS | GAAGCTGAGCAGCGTGACAGCCGCCGACACCGCT |
| GGGGSGGGGSGGGG | GTGTATTACTGTGCGAGACACTACTACTACTACTA |
| SGGDIQMTQSPSSLS | CCTGGACGTCTGGGGCAAAGGGACCACGGTCACCG |
| ASVGDRVTITCRASQ | TGTCCTCAGGCGGAGGTGGAAGCGGAGGGGGAGG |
| SISSYLNWYQQKPGK | ATCTGGCGGCGGAGGAAGCGGAGGCGACATCCAG |
| APKLLIYAASSLQSG | ATGACCCAGTCTCCATCCTCCCTGTCTGCATCTGTA |
| VPSRFSGSGSGTDFT | GGAGACAGAGTCACCATCACTTGCCGGGCAAGTCA |
| LTISSLQPEDFATYYC | GAGCATTAGCAGCTATTTAAATTGGTATCAGCAGA |
| QQSYSTPLTFGGGTK | AACCAGGGAAAGCCCCTAAGCTCCTGATCTATGCT |
| VEIK (SEQ ID NO: | GCATCCAGTTTGCAAAGTGGGGTCCCATCAAGGTT |
| 118) | CAGTGGCAGTGGATCTGGGACAGATTTCACTCTCA |
| | CCATCAGCAGTCTGCAACCTGAAGATTTTGCAACT |
| | TACTACTGTCAACAGAGTTACAGTACCCCTCTCACT |
| | TTCGGCGGCGGAACAAAGGTGGAGATCAAG (SEQ |
| | ID NO: 127) |
| EVQLVESGGGLVQP | GAAGTGCAGCTGGTGGAAAGCGGCGGAGGCCTGG |
| GGSLRLSCAASGFTF | TGCAGCCTGGCGGCAGCCTGAGACTGTCTTGCGCC |
| SSYWMHWVRQAPG | GCCAGCGGCTTCACCTTCAGCAGCTACTGGATGCA |
| KGLVWVSRINSDGSS | CTGGGTCCGCCAGGCCCCTGGCAAGGGACTGGTCT |
| TSYADSVKGRFTISR | GGGTGTCTCGAATCAACAGCGACGGCAGCAGCACC |
| DNAKNTLYLQMNSL | AGCTACGCCGACAGCGTGAAGGGCCGGTTCACCAT |
| RAEDTAVYYCCLGV | CAGCCGGGACAACGCCAAGAACACCCTGTACCTGC |
| LLYNWFDPWGQGTL | AGATGAACAGCCTGCGGGCCGAGGACACCGCCGT |
| VTVSSGGGGSGGGG | GTATTACTGTTGTTTGGGTGTTTTATTATACAACTG |
| SGGGGSGGDIQMTQ | GTTCGACCCCTGGGGCCAGGGAACCCTGGTCACCG |
| SPSSLSASVGDRVTIT | TGTCCTCAGGCGGAGGTGGAAGCGGAGGGGGAGG |
| CRASQSISSYLNWYQ | ATCTGGCGGCGGAGGAAGCGGAGGCGACATCCAG |
| QKPGKAPKLLIYAAS | ATGACCCAGTCTCCATCCTCCCTGTCTGCATCTGTA |
| SLQSGVPSRFSGSGS | GGAGACAGAGTCACCATCACTTGCCGGGCAAGTCA |
| GTDFTLTISSLQPEDF | GAGCATTAGCAGCTATTTAAATTGGTATCAGCAGA |
| ATYYCQQSYSTPLTF | AACCAGGGAAAGCCCCTAAGCTCCTGATCTATGCT |
| GGGTKVEIK (SEQ ID | GCATCCAGTTTGCAAAGTGGGGTCCCATCAAGGTT |
| NO: 119) | CAGTGGCAGTGGATCTGGGACAGATTTCACTCTCA |
| | CCATCAGCAGTCTGCAACCTGAAGATTTTGCAACT |
| | TACTACTGTCAACAGAGTTACAGTACCCCTCTCACT |
| | TTCGGCGGCGGAACAAAGGTGGAGATCAAG (SEQ |
| | ID NO: 128) |
| QVQLQESGPGLVKPS | CAGGTGCAGCTGCAGGAAAGCGGCCCTGGCCTGGT |
| QTLSLTCTVSGGSISS | GAAACCCAGCCAGACCCTGAGCCTGACCTGCACAG |
| GGYYWSWIRQPPGK | TGTCCGGCGGCTCGATCAGCAGCGGCGGCTACTAC |
| GLEWIGYIYYSGSTY | TGGTCCTGGATCAGACAGCCCCCTGGCAAGGGCCT |
| YNPSLKSRVTISVDTS | GGAATGGATCGGCTACATCTACTACAGCGGCAGCA |
| KNQFSLKLSSVTAAD | CCTACTACAACCCCAGCCTGAAGTCCAGAGTGACC |
| TAVYYCARHYYYY | ATCAGCGTGGACACCAGCAAGAACCAGTTCAGCCT |
| MDVWGKGTTVTVSS | GAAGCTGAGCAGCGTGACAGCCGCCGACACCGCT |
| GGGGSGGGGSGGGG | GTGTATTACTGTGCGAGACACTACTACTACTACAT |
| SGGDIQMTQSPSSLS | GGACGTCTGGGGCAAAGGGACCACGGTCACCGTGT |
| ASVGDRVTITCRASQ | CCTCAGGCGGAGGTGGAAGCGGAGGGGGAGGATC |
| SISSYLNWYQQKPGK | TGGCGGCGGAGGAAGCGGAGGCGACATCCAGATG |
| APKLLIYAASSLQSG | ACCCAGTCTCCATCCTCCCTGTCTGCATCTGTAGGA |
| VPSRFSGSGSGTDFT | GACAGAGTCACCATCACTTGCCGGGCAAGTCAGAG |
| LTISSLQPEDFATYYC | CATTAGCAGCTATTTAAATTGGTATCAGCAGAAAC |
| QQSYSTPLTFGGGTK | CAGGGAAAGCCCCTAAGCTCCTGATCTATGCTGCA |
| VEIK (SEQ ID NO: | TCCAGTTTGCAAAGTGGGGTCCCATCAAGGTTCAG |
| 120) | TGGCAGTGGATCTGGGACAGATTTCACTCTCACCA |
| | TCAGCAGTCTGCAACCTGAAGATTTTGCAACTTAC |
| | TACTGTCAACAGAGTTACAGTACCCCTCTCACTTTC |
| | GGCGGCGGAACAAAGGTGGAGATCAAG (SEQ ID |
| | NO: 129) |
| QITLKESGPTLVKPT | CAGATCACCCTGAAAGAGTCCGGCCCCACCCTGGT |
| QTLTLTCTFSGFSLST | GAAACCCACCCAGACCCTGACCCTGACATGCACCT |
| SGVGVGWIRQPPGK | TCAGCGGCTTCAGCCTGAGCACCTCTGGCGTGGGC |
| ALEWLALIYWNDDK | GTGGGCTGGATCAGACAGCCTCCCGGCAAGGCCCT |
| RYSPSLKSRLTITKDT | GGAATGGCTGGCCCTGATCTACTGGAACGACGACA |
| SKNQVVLTMTNMDP | AGCGGTACAGCCCCAGCCTGAAGTCCCGGCTGACC |
| VDTATYYCAHKTTS | ATCACCAAGGACACCTCGAAGAACCAGGTGGTGCT |
| FYFDYWGQGTLVTV | GACCATGACAAACATGGACCCCGTGGACACCGCCA |
| SSGGGGSGGGGSGG | CATATTACTGTGCACACAAAACGACGTCGTTTTAC |
| GGSGGDIQMTQSPSS | TTTGACTACTGGGGCCAGGGAACCCTGGTCACCGT |
| LSASVGDRVTITCRA | GTCCTCAGGCGGAGGTGGAAGCGGAGGGGGAGGA |
| SQSISSYLNWYQQKP | TCTGGCGGCGGAGGAAGCGGAGGCGACATCCAGA |
| GKAPKLLIYAASSLQ | TGACCCAGTCTCCATCCTCCCTGTCTGCATCTGTAG |
| SGVPSRFSGSGSGTD | GAGACAGAGTCACCATCACTTGCCGGGCAAGTCAG |
| FTLTISSLQPEDFATY | AGCATTAGCAGCTATTTAAATTGGTATCAGCAGAA |
| YCQQSYSTPLTFGGG | ACCAGGGAAAGCCCCTAAGCTCCTGATCTATGCTG |
| TKVEIK (SEQ ID NO: | CATCCAGTTTGCAAAGTGGGGTCCCATCAAGGTTC |
| 121) | AGTGGCAGTGGATCTGGGACAGATTTCACTCTCAC |
| | CATCAGCAGTCTGCAACCTGAAGATTTTGCAACTT |
| | ACTACTGTCAACAGAGTTACAGTACCCCTCTCACTT |
| | TCGGCGGCGGAACAAAGGTGGAGATCAAG (SEQ ID |
| | NO: 130) |
| QVQLQESGPGLVKPS | CAGGTGCAGCTGCAGGAAAGCGGCCCTGGCCTGGT |
| QTLSLTCTVSGGSISS | GAAACCCAGCCAGACCCTGAGCCTGACCTGCACAG |
| GGYYWSWIRQPPGK | TGTCCGGCGGCTCGATCAGCAGCGGCGGCTACTAC |
| GLEWIGYIYYSGSTY | TGGTCCTGGATCAGACAGCCCCCTGGCAAGGGCCT |
| YNPSLKSRVTISVDTS | GGAATGGATCGGCTACATCTACTACAGCGGCAGCA |
| KNQFSLKLSSVTAAD | CCTACTACAACCCCAGCCTGAAGTCCAGAGTGACC |
| TAVYYCARHYYYYY | ATCAGCGTGGACACCAGCAAGAACCAGTTCAGCCT |
| MDVWGKGTTVTVSS | GAAGCTGAGCAGCGTGACAGCCGCCGACACCGCT |
| GGGGSGGGGSGGGG | GTGTATTACTGTGCGAGACACTACTACTACTACTA |
| SGGDIQMTQSPSSLS | CATGGACGTCTGGGGCAAAGGGACCACGGTCACC |
| ASVGDRVTITCRASQ | GTGTCCTCAGGCGGAGGTGGAAGCGGAGGGGGAG |
| SISSYLNWYQQKPGK | GATCTGGCGGCGGAGGAAGCGGAGGCGACATCCA |
| APKLLIYAASSLQSG | GATGACCCAGTCTCCATCCTCCCTGTCTGCATCTGT |
| VPSRFSGSGSGTDFT | AGGAGACAGAGTCACCATCACTTGCCGGGCAAGTC |
| LTISSLQPEDFATYYC | AGAGCATTAGCAGCTATTTAAATTGGTATCAGCAG |
| QQSYSTPLTFGGGTK | AAACCAGGGAAAGCCCCTAAGCTCCTGATCTATGC |
| VEIK (SEQ ID NO: | TGCATCCAGTTTGCAAAGTGGGGTCCCATCAAGGT |
| 122) | TCAGTGGCAGTGGATCTGGGACAGATTTCACTCTC |
| | ACCATCAGCAGTCTGCAACCTGAAGATTTTGCAAC |
| | TTACTACTGTCAACAGAGTTACAGTACCCCTCTCAC |
| | TTTCGGCGGCGGAACAAAGGTGGAGATCAAG (SEQ |
| | ID NO: 131) |

HLA-C*07 antigen binding domains

| | |
|---|---|
| C7-45 | EVQLLESGGGLVQPGGSLRLSCAASGFTFSSYAMSWVRQAPGKGLEW |
| | VSAISGSGGSTYYADSVKGRFTISRDNSKNTLYLQMNSLRAEDTAVYYCA |
| | VSFDWFDPWGQGTLVTVSSGGGGSGGGGSGGGGSGGDIQMTQSPS |
| | SLSASVGDRVTITCRASQSISSYLNWYQQKPGKAPKLLIYAASSLQSGVPS |
| | RFSGSGSGTDFTLTISSLQPEDFATYYCQQSYSTPLTFGGGTKVEIK (SEQ |
| | ID NO: 570) |
| C7-44 | QVQLQESGPGLVKPSQTLSLTCTVSGGSISSGGYYWSWIRQPPGKGLE |
| | WIGYIYYSGSTYYNPSLKSRVTISVDTSKNQFSLKLSSVTAADTAVYYCAR |
| | ERSISPYYYYYMDVWGKGTTVTVSSGGGGSGGGGSGGGGSGGDIQM |
| | TQSPSSLSASVGDRVTITCRASQSISSYLNWYQQKPGKAPKLLIYAASSLQ |
| | SGVPSRFSGSGSGTDFTLTISSLQPEDFATYYCQQSYSTPLTFGGGTKVEI |
| | K (SEQ ID NO: 571) |
| C7-43 | QLQLQESGPGLVKPSETLSLTCTVSGGSISSSSYYWGWIRQPPGKGLEWI |
| | GSIYYSGSTYYNPSLKSRVTISVDTSKNQFSLKLSSVTAADTAVYYCARDS |
| | VIWYWFDPWGQGTLVTVSSGGGGSGGGGSGGGGSGGQSVLTQPPS |
| | ASGTPGQRVTISCSGSSSNIGSNTVNWYQQLPGTAPKLLIYSNNQRPSG |
| | VPDRFSGSKSGTSASLAISGLQSEDEADYYCAAWDDSLNGWVFGGGTK |
| | LTVL (SEQ ID NO: 572) |
| C7-42 | QVQLQESGPGLVKPSQTLSLTCTVSGGSISSGGYYWSWIRQPPGKGLE |
| | WIGYIYYSGSTYYNPSLKSRVTISVDTSKNQFSLKLSSVTAADTAVYYCAR |
| | EEILPRLSYYYYMDVWGKGTTVTVSSGGGGSGGGGSGGGGSGGDIQM |
| | TQSPSSLSASVGDRVTITCRASQSISSYLNWYQQKPGKAPKLLIYAASSLQ |
| | SGVPSRFSGSGSGTDFTLTISSLQPEDFATYYCQQSYSTPLTFGGGTKVEI |
| | K (SEQ ID NO: 573) |
| C7-41 | QVQLVQSGSELKKPGASVKVSCKASGYTFTSYAMNWVRQAPGQGLE |
| | WMGWINTNTGNPTYAQGFTGRFVFSFDTSVSTAYLQICSLKAEDTAVY |
| | YCARGGRAHSSWYFDLWGRGTLVTVSSGGGGSGGGGSGGGGSGGDI |
| | QMTQSPSSLSASVGDRVTITCRASQSISSYLNWYQQKPGKAPKLLIYAAS |
| | SLQSGVPSRFSGSGSGTDFTLTISSLQPEDFATYYCQQSYSTPLTFGGGTK |
| | VEIK (SEQ ID NO: 574) |
| C7-40 | QVQLQESGPGLVKPSQTLSLTCTVSGGSISSGGYYWSWIRQPPGKGLE |
| | WIGYIYYSGSTYYNPSLKSRVTISVDTSKNQFSLKLSSVTAADTAVYYCAR |
| | DRIKILPRLGYYYYMDVWGKGTTVTVSSGGGGSGGGGSGGGGSGGDI |
| | QMTQSPSSLSASVGDRVTITCRASQSISSYLNWYQQKPGKAPKLLIYAAS |
| | SLQSGVPSRFSGSGSGTDFTLTISSLQPEDFATYYCQQSYSTPLTFGGGTK |
| | VEIK (SEQ ID NO: 575) |
| C7-39 | QVQLQESGPGLVKPSQTLSLTCTVSGGSISSGGYYWSWIRQPPGKGLE |
| | WIGYIYYSGSTYYNPSLKSRVTISVDTSKNQFSLKLSSVTAADTAVYYCAR |
| | DTVIHYYYYMDVWGKGTTVTVSSGGGGSGGGGSGGGGSGGDIQMT |
| | QSPSSLSASVGDRVTITCRASQSISSYLNWYQQKPGKAPKLLIYAASSLQS |
| | GVPSRFSGSGSGTDFTLTISSLQPEDFATYYCQQSYSTPLTFGGGTKVEIK |
| | (SEQ ID NO: 576) |
| C7-38 | QVQLQESGPGLVKPSQTLSLTCTVSGGSISSGGYYWSWIRQPPGKGLE |
| | WIGYIYYSGSTYYNPSLKSRVTISVDTSKNQFSLKLSSVTAADTAVYYCAR |
| | DVIVEVFLSYYYYMDVWGKGTTVTVSSGGGGSGGGGSGGGGSGGDIQ |
| | MTQSPSSLSASVGDRVTITCRASQSISSYLNWYQQKPGKAPKLLIYAASS |
| | LQSGVPSRFSGSGSGTDFTLTISSLQPEDFATYYCQQSYSTPLTFGGGTK |
| | VEIK (SEQ ID NO: 577) |
| C7-37 | QVQLQESGPGLVKPSQTLSLTCTVSGGSISSGGYYWSWIRQPPGKGLE |
| | WIGYIYYSGSTYYNPSLKSRVTISVDTSKNQFSLKLSSVTAADTAVYYCAR |
| | DIFIHYYYYMDVWGKGTTVTVSSGGGGSGGGGSGGGGSGGDIQMTQ |
| | SPSSLSASVGDRVTITCRASQSISSYLNWYQQKPGKAPKLLIYAASSLQSG |
| | VPSRFSGSGSGTDFTLTISSLQPEDFATYYCQQSYSTPLTFGGGTKVEIK |
| | (SEQ ID NO: 578) |
| C7-36 | EVQLVESGGGLVQPGGSLRLSCAASGFTFSSYSMNWVRQAPGKGLEW |
| | VSYISSSSSTIYYADSVKGRFTISRDNAKNSLYLQMNSLRAEDTAVYYCAR |
| | DGTFYSYSPYYFDYWGQGTLVTVSSGGGGSGGGGSGGGGSGGDIQM |
| | TQSPSSLSASVGDRVTITCRASQSISSYLNWYQQKPGKAPKLLIYAASSLQ |
| | SGVPSRFSGSGSGTDFTLTISSLQPEDFATYYCQQSYSTPLTFGGGTKVEI |
| | K (SEQ ID NO: 579) |
| C7-35 | QVQLQESGPGLVKPSQTLSLTCTVSGGSISSGGYYWSWIRQPPGKGLE |
| | WIGYIYYSGSTYYNPSLKSRVTISVDTSKNQFSLKLSSVTAADTAVYYCAR |
| | EWIKILPRLGYYYYMDVWGKGTTVTVSSGGGGSGGGGSGGGGSGGDI |
| | QMTQSPSSLSASVGDRVTITCRASQSISSYLNWYQQKPGKAPKLLIYAAS |
| | SLQSGVPSRFSGSGSGTDFTLTISSLQPEDFATYYCQQSYSTPLTFGGGTK |
| | VEIK (SEQ ID NO: 580) |
| C7-34 | QVQLQESGPGLVKPSQTLSLTCTVSGGSISSGGYYWSWIRQPPGKGLE |
| | WIGYIYYSGSTYYNPSLKSRVTISVDTSKNQFSLKLSSVTAADTAVYYCAR |
| | DRSLYYYYYMDVWGKGTTVTVSSGGGGSGGGGSGGGGSGGDIQMT |
| | QSPSSLSASVGDRVTITCRASQSISSYLNWYQQKPGKAPKLLIYAASSLQS |
| | GVPSRFSGSGSGTDFTLTISSLQPEDFATYYCQQSYSTPLTFGGGTKVEIK |
| | (SEQ ID NO: 581) |
| C7-33 | QVQLQESGPGLVKPSQTLSLTCTVSGGSISSGGYYWSWIRQPPGKGLE |
| | WIGYIYYSGSTYYNPSLKSRVTISVDTSKNQFSLKLSSVTAADTAVYYCAR |
| | DKILAPNYYYYMDVWGKGTTVTVSSGGGGSGGGGSGGGGSGGDIQM |
| | TQSPSSLSASVGDRVTITCRASQSISSYLNWYQQKPGKAPKLLIYAASSLQ |
| | SGVPSRFSGSGSGTDFTLTISSLQPEDFATYYCQQSYSTPLTFGGGTKVEI |
| | K (SEQ ID NO: 582) |
| C7-32 | QVQLQESGPGLVKPSQTLSLTCTVSGGSISSGGYYWSWIRQPPGKGLE |
| | WIGYIYYSGSTYYNPSLKSRVTISVDTSKNQFSLKLSSVTAADTAVYYCAR |
| | EKSWKYFYYYYYYMDVWGKGTTVTVSSGGGGSGGGGSGGGGSGGDI |
| | QMTQSPSSLSASVGDRVTITCRASQSISSYLNWYQQKPGKAPKLLIYAAS |
| | SLQSGVPSRFSGSGSGTDFTLTISSLQPEDFATYYCQQSYSTPLTFGGGTK |
| | VEIK (SEQ ID NO: 583) |
| C7-31 | QVQLQESGPGLVKPSQTLSLTCTVSGGSISSGGYYWSWIRQPPGKGLE |
| | WIGYIYYSGSTYYNPSLKSRVTISVDTSKNQFSLKLSSVTAADTAVYYCAR |
| | ENTSTIPYYYYYMDVWGKGTTVTVSSGGGGSGGGGSGGGGSGGDIQ |
| | MTQSPSSLSASVGDRVTITCRASQSISSYLNWYQQKPGKAPKLLIYAASS |
| | LQSGVPSRFSGSGSGTDFTLTISSLQPEDFATYYCQQSYSTPLTFGGGTK |
| | VEIK (SEQ ID NO: 584) |
| C7-30 | QVQLQESGPGLVKPSQTLSLTCTVSGGSISSGGYYWSWIRQPPGKGLE |
| | WIGYIYYSGSTYYNPSLKSRVTISVDTSKNQFSLKLSSVTAADTAVYYCAR |
| | EDVDKNTSTIYYYYYYMDVWGKGTTVTVSSGGGGSGGGGSGGGGSG |
| | GDIQMTQSPSSLSASVGDRVTITCRASQSISSYLNWYQQKPGKAPKLLIY |
| | AASSLQSGVPSRFSGSGSGTDFTLTISSLQPEDFATYYCQQSYSTPLTFGG |
| | GTKVEIK (SEQ ID NO: 585) |
| C7-29 | QVQLVESGGGLVKPGGSLRLSCAASGFTFSDYYMSWIRQAPGKGLEW |
| | VSYISSSGSTIYYADSVKGRFTISRDNAKNSLYLQMNSLRAEDTAVYYCAR |
| | DGGDIVSSSAIYWYFDLWGRGTLVTVSSGGGGSGGGGSGGGGSGGAI |
| | QLTQSPSSLSASVGDRVTITCRASQGISSALAWYQQKPGKAPKLLIYDAS |
| | SLESGVPSRFSGSGSGTDFTLTISSLQPEDFATYYCQQFNSYPLTFGGGTK |
| | VEIK (SEQ ID NO: 586) |
| C7-28 | QVQLQESGPGLVKPSQTLSLTCTVSGGSISSGGYYWSWIRQPPGKGLE |
| | WIGYIYYSGSTYYNPSLKSRVTISVDTSKNQFSLKLSSVTAADTAVYYCAR |
| | DLILPPYYYYYMDVWGKGTTVTVSSGGGGSGGGGSGGGGSGGDIQM |
| | TQSPSSLSASVGDRVTITCRASQSISSYLNWYQQKPGKAPKLLIYAASSLQ |
| | SGVPSRFSGSGSGTDFTLTISSLQPEDFATYYCQQSYSTPLTFGGGTKVEI |
| | K (SEQ ID NO: 587) |
| C7-27 | QVQLQESGPGLVKPSQTLSLTCTVSGGSISSGGYYWSWIRQPPGKGLE |
| | WIGYIYYSGSTYYNPSLKSRVTISVDTSKNQFSLKLSSVTAADTAVYYCAR |
| | ETWIKILPRYYYYYYYMDVWGKGTTVTVSSGGGGSGGGGSGGGGSGG |
| | DIQMTQSPSSLSASVGDRVTITCRASQSISSYLNWYQQKPGKAPKLLIYA |
| | ASSLQSGVPSRFSGSGSGTDFTLTISSLQPEDFATYYCQQSYSTPLTFGGG |
| | TKVEIK (SEQ ID NO: 588) |
| C7-26 | QVQLQESGPGLVKPSQTLSLTCTVSGGSISSGGYYWSWIRQPPGKGLE |
| | WIGYIYYSGSTYYNPSLKSRVTISVDTSKNQFSLKLSSVTAADTAVYYCAR |
| | DLSRYYYYYMDVWGKGTTVTVSSGGGGSGGGGSGGGGSGGDIQMT |
| | QSPSSLSASVGDRVTITCRASQSISSYLNWYQQKPGKAPKLLIYAASSLQS |
| | GVPSRFSGSGSGTDFTLTISSLQPEDFATYYCQQSYSTPLTFGGGTKVEIK |
| | (SEQ ID NO: 589) |
| C7-25 | EVQLVESGGGLVQPGGSLRLSCAASGFTFSSYSMNWVRQAPGKGLEW |
| | VSYISSSSSTIYYADSVKGRFTISRDNAKNSLYLQMNSLRAEDTAVYYCAR |
| | EHIVLCFDYWGQGTLVTVSSGGGGSGGGGSGGGGSGGDIQMTQSPSS |
| | LSASVGDRVTITCRASQGISSWUXWYQQKPEKAPKSLIYAASSLQSGVPS |
| | RFSGSGSGTDFTLTISSLQPEDFATYYCQQYNSYPLTFGGGTKVEIK (SEQ |
| | ID NO: 590) |
| C7-24 | QVQLQESGPGLVKPSQTLSLTCTVSGGSISSGGYYWSWIRQPPGKGLE |
| | WIGYIYYSGSTYYNPSLKSRVTISVDTSKNQFSLKLSSVTAADTAVYYCAR |
| | DKILPRPYYYYYMDVWGKGTTVTVSSGGGGSGGGGSGGGGSGGDIQ |
| | MTQSPSSLSASVGDRVTITCRASQSISSYLNWYQQKPGKAPKLLIYAASS |
| | LQSGVPSRFSGSGSGTDFTLTISSLQPEDFATYYCQQSYSTPLTFGGGTK |
| | VEIK (SEQ ID NO: 591) |
| C7-23 | QVQLVQSGAEVKKPGASVKVSCKASGYTFTSYGISWVRQAPGQGLEW |
| | MGWISAYNGNTNYAQKLQGRVTMTTDTSTSTAYMELRSLRSDDTAVY |
| | YCARGSNEYFQHWGQGTLVTVSSGGGGSGGGGSGGGGSGGQSALTQ |
| | PPSASGSPGQSVTISCTGTSSDVGGYNYVSWYQQHPGKAPKLMIYEVS |
| | KRPSGVPDRFSGSKSGNTASLTVSGLQAEDEADYYCSSYAGSNNWVFG |
| | GGTKLTVL (SEQ ID NO: 592) |
| C7-22 | QVQLVQSGSELKKPGASVKVSCKASGYTFTSYAMNWVRQAPGQGLE |
| | WMGWINTNTGNPTYAQGFTGRFVFSFDTSVSTAYLQICSLKAEDTAVY |
| | YCARGTSYWYFDLWGRGTLVTVSSGGGGSGGGGSGGGGSGGDIQMT |
| | QSPSSLSASVGDRVTITCRASQSISSYLNWYQQKPGKAPKLLIYAASSLQS |
| | GVPSRFSGSGSGTDFTLTISSLQPEDFATYYCQQSYSTPLTFGGGTKVEIK |
| | (SEQ ID NO: 593) |
| C7-21 | QVQLQESGPGLVKPSQTLSLTCTVSGGSISSGGYYWSWIRQPPGKGLE |
| | WIGYIYYSGSTYYNPSLKSRVTISVDTSKNQFSLKLSSVTAADTAVYYCAR |
| | EEIVEVFYYYYMDVWGKGTTVTVSSGGGGSGGGGSGGGGSGGDIQM |
| | TQSPSSLSASVGDRVTITCRASQSISSYLNWYQQKPGKAPKLLIYAASSLQ |
| | SGVPSRFSGSGSGTDFTLTISSLQPEDFATYYCQQSYSTPLTFGGGTKVEI |
| | K (SEQ ID NO: 594) |
| C7-20 | EVQLLESGGGLVQPGGSLRLSCAASGFTFSSYAMSWVRQAPGKGLEW |
| | VSAISGSGGSTYYADSVKGRFTISRDNSKNTLYLQMNSLRAEDTAVYYCA |
| | KVDDYYFDYWGQGTLVTVSSGGGGSGGGGSGGGGSGGDIQMTQSPS |
| | SLSASVGDRVTITCRASQSISSYLNWYQQKPGKAPKLLIYAASSLQSGVPS |
| | RFSGSGSGTDFTLTISSLQPEDFATYYCQQSYSTPLTFGGGTKVEIK (SEQ |
| | ID NO: 595) |
| C7-19 | EVQLVESGGGLVQPGGSLRLSCAASGFTFSSYWMHWVRQAPGKGLV |
| | WVSRINSDGSSTSYADSVKGRFTISRDNAKNTLYLQMNSLRAEDTAVYY |
| | CAWSTNILLSYTKAFDIWGQGTMVTVSSGGGGSGGGGSGGGGSGGDI |
| | QMTQSPSSLSASVGDRVTITCRASQSISSYLNWYQQKPGKAPKLLIYAAS |
| | SLQSGVPSRFSGSGSGTDFTLTISSLQPEDFATYYCQQSYSTPLTFGGGTK |
| | VEIK (SEQ ID NO: 596) |
| C7-18 | QVQLQESGPGLVKPSQTLSLTCTVSGGSISSGGYYWSWIRQPPGKGLE |
| | WIGYIYYSGSTYYNPSLKSRVTISVDTSKNQFSLKLSSVTAADTAVYYCAR |
| | DKTYYYYYYMDVWGKGTTVTVSSGGGGSGGGGSGGGGSGGDIQMT |
| | QSPSSLSASVGDRVTITCRASQSISSYLNWYQQKPGKAPKLLIYAASSLQS |
| | GVPSRFSGSGSGTDFTLTISSLQPEDFATYYCQQSYSTPLTFGGGTKVEIK |
| | (SEQ ID NO: 597) |
| C7-17 | QVQLQESGPGLVKPSQTLSLTCTVSGGSISSGGYYWSWIRQPPGKGLE |
| | WIGYIYYSGSTYYNPSLKSRVTISVDTSKNQFSLKLSSVTAADTAVYYCAR |
| | EKYFHDKYFHDYYYYYMDVWGKGTTVTVSSGGGGSGGGGSGGGGSG |
| | GDIQMTQSPSSLSASVGDRVTITCRASQSISSYLNWYQQKPGKAPKLLIY |
| | AASSLQSGVPSRFSGSGSGTDFTLTISSLQPEDFATYYCQQSYSTPLTFGG |
| | GTKVEIK (SEQ ID NO: 598) |
| C7-16 | QVQLQESGPGLVKPSQTLSLTCTVSGGSISSGGYYWSWIRQPPGKGLE |
| | WIGYIYYSGSTYYNPSLKSRVTISVDTSKNQFSLKLSSVTAADTAVYYCAR |
| | DTSVYYYYYMDVWGKGTTVTVSSGGGGSGGGGSGGGGSGGDIQMT |
| | QSPSSLSASVGDRVTITCRASQSISSYLNWYQQKPGKAPKLLIYAASSLQS |
| | GVPSRFSGSGSGTDFTLTISSLQPEDFATYYCQQSYSTPLTFGGGTKVEIK |
| | (SEQ ID NO: 599) |
| C7-15 | QVQLQESGPGLVKPSQTLSLTCTVSGGSISSGGYYWSWIRQPPGKGLE |
| | WIGYIYYSGSTYYNPSLKSRVTISVDTSKNQFSLKLSSVTAADTAVYYCAR |
| | EKILPYYYYYYMDVWGKGTTVTVSSGGGGSGGGGSGGGGSGGDIQM |
| | TQSPSSLSASVGDRVTITCRASQSISSYLNWYQQKPGKAPKLLIYAASSLQ |
| | SGVPSRFSGSGSGTDFTLTISSLQPEDFATYYCQQSYSTPLTFGGGTKVE |
| | K (SEQ ID NO: 600) |
| C7-14 | EVQLVESGGGLVQPGGSLRLSCAASGFTFSSYSMNWVRQAPGKGLEW |
| | VSYISSSSSTIYYADSVKGRFTISRDNAKNSLYLQMNSLRAEDTAVYYCAI |
| | QWIYIYINPRGFIFLHDAFDIWGQGTMVTVSSGGGGSGGGGSGGGGS |
| | GGQSVLTQPPSASGTPGQRVTISCSGSSSNIGSNTVNWYQQLPGTAPK |
| | LLIYSNNQRPSGVPDRFSGSKSGTSASLAISGLQSEDEADYYCAAWDDSL |
| | NGWVFGGGTKLTVL (SEQ ID NO: 601) |
| C7-13 | QVQLQQSGPGLVKPSQTLSLTCAISGDSVSSNSAAWNWIRQSPSRGLE |
| | WLGRTYYRSKWYNDYAVSVKSRITINPDTSKNQFSLQLNSVTPEDTAVY |
| | YCAKEDVDFHHDAFDIWGQGTMVTVSSGGGGSGGGGSGGGGSGGDI |
| | QMTQSPSSLSASVGDRVTITCRASQSISSYLNWYQQKPGKAPKLLIYAAS |
| | SLQSGVPSRFSGSGSGTDFTLTISSLQPEDFATYYCQQSYSTPLTFGGGTK |
| | VEIK (SEQ ID NO: 602) |
| C7-12 | QVQLQESGPGLVKPSQTLSLTCTVSGGSISSGGYYWSWIRQPPGKGLE |
| | WIGYIYYSGSTYYNPSLKSRVTISVDTSKNQFSLKLSSVTAADTAVYYCAR |
| | EGVDKNTSTIYYYYYYMDVWGKGTTVTVSSGGGGSGGGGSGGGGSG |
| | GDIQMTQSPSSLSASVGDRVTITCRASQSISSYLNWYQQKPGKAPKLLIY |
| | AASSLQSGVPSRFSGSGSGTDFTLTISSLQPEDFATYYCQQSYSTPLTFGG |
| | GTKVEIK (SEQ ID NO: 603) |
| C7-11 | EVQLVESGGGLVQPGGSLRLSCAASGFTFSSYSMNWVRQAPGKGLEW |
| | VSYISSSSSTIYYADSVKGRFTISRDNAKNSLYLQMNSLRAEDTAVYYCAR |
| | DRRGYFDLWGRGTLVTVSSGGGGSGGGGSGGGGSGGDIQMTQSPSS |
| | LSASVGDRVTITCRASQGISSWUXWYQQKPEKAPKSLIYAASSLQSGVPS |
| | RFSGSGSGTDFTLTISSLQPEDFATYYCQQYNSYPLTFGGGTKVEIK (SEQ |
| | ID NO: 604) |
| C7-10 | EVQLVQSGAEVKKPGATVKISCKVSGYTFTDYYMHWVQQAPGKGLEW |
| | MGLVDPEDGETIYAEKFQGRVTITADTSTDTAYMELSSLRSEDTAVYYC |
| | ATGIHVDIRSMEDWFDPWGQGTLVTVSSGGGGSGGGGSGGGGSGG |
| | DIQMTQSPSSLSASVGDRVTITCRASQSISSYLNWYQQKPGKAPKLLIYA |
| | ASSLQSGVPSRFSGSGSGTDFTLTISSLQPEDFATYYCQQSYSTPLTFGGG |
| | TKVEIK (SEQ ID NO: 605) |
| C7-9 | QVQLQESGPGLVKPSQTLSLTCTVSGGSISSGGYYWSWIRQPPGKGLE |
| | WIGYIYYSGSTYYNPSLKSRVTISVDTSKNQFSLKLSSVTAADTAVYYCAR |
| | DIGTSYYYYMDVWGKGTTVTVSSGGGGSGGGGSGGGGSGGDIQMTQ |
| | SPSSLSASVGDRVTITCRASQSISSYLNWYQQKPGKAPKLLIYAASSLQSG |
| | VPSRFSGSGSGTDFTLTISSLQPEDFATYYCQQSYSTPLTFGGGTKVEIK |
| | (SEQ ID NO: 606) |
| C7-8 | QVQLQESGPGLVKPSQTLSLTCTVSGGSISSGGYYWSWIRQPPGKGLE |
| | WIGYIYYSGSTYYNPSLKSRVTISVDTSKNQFSLKLSSVTAADTAVYYCAR |
| | EVVEVFLYYYYYMDVWGKGTTVTVSSGGGGSGGGGSGGGGSGGDIQ |
| | MTQSPSSLSASVGDRVTITCRASQSISSYLNWYQQKPGKAPKLLIYAASS |
| | LQSGVPSRFSGSGSGTDFTLTISSLQPEDFATYYCQQSYSTPLTFGGGTK |
| | VEIK (SEQ ID NO: 607) |
| C7-7 | QVQLQESGPGLVKPSQTLSLTCTVSGGSISSGGYYWSWIRQPPGKGLE |
| | WIGYIYYSGSTYYNPSLKSRVTISVDTSKNQFSLKLSSVTAADTAVYYCAR |
| | DLYYYYYYYMDVWGKGTTVTVSSGGGGSGGGGSGGGGSGGDIQMT |
| | QSPSSLSASVGDRVTITCRASQSISSYLNWYQQKPGKAPKLLIYAASSLQS |
| | GVPSRFSGSGSGTDFTLTISSLQPEDFATYYCQQSYSTPLTFGGGTKVEIK |
| | (SEQ ID NO: 608) |
| C7-6 | QVQLQESGPGLVKPSQ.TLSLTCTVSGGSISSGGYYWSWIRQPPGKGLE |
| | WIGYIYYSGSTYYNPSLKSRVTISVDTSKNQFSLKLSSVTAADTAVYYCAR |
| | ESWKYFYPRGSIFIHYYYYMDVWGKGTTVTVSSGGGGSGGGGSGGGG |
| | SGGDIQMTQSPSSLSASVGDRVTITCRASQSISSYLNWYQQKPGKAPKL |
| | LIYAASSLQSGVPSRFSGSGSGTDFTLTISSLQPEDFATYYCQQSYSTPLTF |
| | GGGTKVEIK (SEQ ID NO: 609 |
| C7-5 | QVQLQESGPGLVKPSQTLSLTCTVSGGSISSGGYYWSWIRQPPGKGLE |
| | WIGYIYYSGSTYYNPSLKSRVTISVDTSKNQFSLKLSSVTAADTAVYYCAR |
| | DRIVEVFYYYYMDVWGKGTTVTVSSGGGGSGGGGSGGGGSGGDIQM |
| | TQSPSSLSASVGDRVTITCRASQSISSYLNWYQQKPGKAPKLLIYAASSLQ |
| | SGVPSRFSGSGSGTDFTLTISSLQPEDFATYYCQQSYSTPLTFGGGTKVEI |
| | K (SEQ ID NO: 610) |
| C7-4 | QVQLQESGPGLVKPSQTLSLTCTVSGGSISSGGYYWSWIRQPPGKGLE |
| | WIGYIYYSGSTYYNPSLKSRVTISVDTSKNQFSLKLSSVTAADTAVYYCAR |
| | EKYFHDWLYYYYYMDVWGKGTTVTVSSGGGGSGGGGSGGGGSGGDI |
| | QMTQSPSSLSASVGDRVTITCRASQSISSYLNWYQQKPGKAPKLLIYAAS |
| | SLQSGVPSRFSGSGSGTDFTLTISSLQPEDFATYYCQQSYSTPLTFGGGTK |
| | VEIK (SEQID NO: 611) |
| C7-3 | QVQLQESGPGLVKPSQTLSLTCTVSGGSISSGGYYWSWIRQPPGKGLE |
| | WIGYIYYSGSTYYNPSLKSRVTISVDTSKNQFSLKLSSVTAADTAVYYCAR |
| | DLVDKNTSYYYYYMDVWGKGTTVTVSSGGGGSGGGGSGGGGSGGDI |
| | QMTQSPSSLSASVGDRVTITCRASQSISSYLNWYQQKPGKAPKLLIYAAS |
| | SLQSGVPSRFSGSGSGTDFTLTISSLQPEDFATYYCQQSYSTPLTFGGGTK |
| | VEIK (SEQID NO: 612) |
| C7-2 | QVQLVQSGAEVKKPGASVKVSCKASGYTFTSYGISWVRQAPGQGLEW |
| | MGWISAYNGNTNYAQKLQGRVTMTTDTSTSTAYMELRSLRSDDTAVY |
| | YCARVQNEYFQHWGQGTLVTVSSGGGGSGGGGSGGGGSGGQSALT |
| | QPPSASGSPGQSVTISCTGTSSDVGGYNYVSWYQQHPGKAPKLMIYEV |
| | SKRPSGVPDRFSGSKSGNTASLTVSGLQAEDEADYYCSSYAGSNNWVF |
| | GGGTKLTVL (SEQ ID NO: 613) |
| C7-1 | QVQLVESGGGLVKPGGSLRLSCAASGFTFSDYYMSWIRQAPGKGLEW |
| | VSYISSSGSTIYYADSVKGRFTISRDNAKNSLYLQMNSLRAEDTAVYYCAT |
| | ANWFDPWGQGTLVTVSSGGGGSGGGGSGGGGSGGDIQMTQSPSSV |
| | SASVGDRVTITCRASQGISSWUXWYQQKPGKAPKLLIYAASSLQSGVPS |
| | RFSGSGSGTDFTLTISSLQPEDFATYYCQQANSFPLTFGGGTKVEIK (SEQ |
| | ID NO: 614) |

HLA-A*03 scFv Sequences

| | |
|---|---|
| 15 | QVQLVQSGAEVKKPGASVKVSCKASGYTFTSYGISW |
| | VRQAPGQGLEWMGWISAYNGNTNYAQKLQGRVTM |
| | TTDTSTSTAYMELRSLRSDDTAVYYCARERVSQRGA |
| | FDIWGQGTMVTVSSGGGGSGGGGSGGGGSGGDIQM |
| | TQSPSSLSASVGDRVTITCRASQSISSYLNWYQQKPG |
| | KAPKLLIYAASSLQSGVPSRFSGSGSGTDFTLTISSLQP |
| | EDFATYYCQQSYSTPLTFGGGTKVEIK (SEQ ID NO: |
| | 615) |
| 16 | EVQLVESGGGLVQPGGSLRLSCAASGFTFSSYSMNW |
| | VRQAPGKGLEWVSYISSSSSTIYYADSVKGRFTISRD |
| | NAKNSLYLQMNSLRAEDTAVYYCARGNPDKDPFDY |
| | WGQGTLVTVSSGGGGSGGGGSGGGGSGGDIQMTQS |
| | PSSLSASVGDRVTITCRASQSISSYLNWYQQKPGKAP |
| | KLLIYAASSLQSGVPSRFSGSGSGTDFTLTISSLQPEDF |
| | ATYYCQQSYSTPLTFGGGTKVEIK (SEQ ID NO: 616) |
| 17 | QVQLQESGPGLVKPSETLSLTCTVSGGSVSSGSYYWS |
| | WIRQPPGKGLEWIGYIYYSGSTNYNPSLKSRVTISVDT |
| | SKNQFSLKLSSVTAADTAVYYCARDFYCTNWYFDL |
| | WGRGTLVTVSSGGGGSGGGGSGGGGSGGDIQMTQS |
| | PSSLSASVGDRVTITCRASQSISSYLNWYQQKPGKAP |
| | KLLIYAASSLQSGVPSRFSGSGSGTDFTLTISSLQPEDF |
| | ATYYCQQSYSTPLTFGGGTKVEIK (SEQ ID NO: 617) |
| 18 | QVQLQESGPGLVKPSETLSLTCTVSGGSISSYYWSWI |
| | RQPPGKGLEWIGYIYYSGSTNYNPSLKSRVTISVDTSK |
| | NQFSLKLSSVTAADTAVYYCARESSSGSYWYFDLWG |
| | RGTLVTVSSGGGGSGGGGSGGGGSGGDIQMTQSPSS |
| | LSASVGDRVTITCRASQSISSYLNWYQQKPGKAPKLL |
| | IYAASSLQSGVPSRFSGSGSGTDFTLTISSLQPEDFATY |
| | YCQQSYSTPLTFGGGTKVEIK (SEQ ID NO: 618) |
| 19 | EVQLVQSGAEVKKPGESLKISCKGSGYSFTSYWIGW |
| | VRQMPGKGLEWMGIIYPGDSDTRYSPSFQGQVTISAD |
| | KSISTAYLQWSSLKASDTAMYYCARDSGYKYNLYY |
| | YYYYMDVWGKGTTVTVSSGGGGSGGGGSGGGGSG |
| | GDIQMTQSPSSLSASVGDRVTITCRASQSISSYLNWY |
| | QQKPGKAPKLLIYAASSLQSGVPSRFSGSGSGTDFTL |
| | TISSLQPEDFATYYCQQSYSTPLTFGGGTKVEIK (SEQ |
| | ID NO: 619) |
| 20 | QVQLVQSGAEVKKPGASVKVSCKASGYTFTSYGISW |
| | VRQAPGQGLEWMGWISAYNGNTNYAQKLQGRVTM |
| | TTDTSTSTAYMELRSLRSDDTAVYYCARGGDLSHYY |
| | YYMDVWGKGTTVTVSSGGGGSGGGGSGGGGSGGQ |
| | TVVTQEPSLTVSPGGTVTLTCASSTGAVTSGYYPNWF |
| | QQKPGQAPRALIYSTSNKHSWTPARFSGSLLGGKAA |
| | LTLSGVQPEDEAEYYCLLYYGGAQWVFGGGTKLTV |
| | L (SEQ ID NO: 620) |
| 21 | QVQLVQSGAEVKKPGASVKVSCKASGYTFTSYGISW |
| | VRQAPGQGLEWMGWISAYNGNTNYAQKLQGRVTM |
| | TTDTSTSTAYMELRSLRSDDTAVYYCARENRRYNSC |
| | YYFDYWGQGTLVTVSSGGGGSGGGGSGGGGSGGDI |
| | QMTQSPSSLSASVGDRVTITCRASQSISSYLNWYQQK |
| | PGKAPKLLIYAASSLQSGVPSRFSGSGSGTDFTLTISSL |
| | QPEDFATYYCQQSYSTPLTFGGGTKVEIK (SEQ ID |
| | NO: 621) |
| 22 | QVQLVQSGAEVKKPGASVKVSCKASGYTFTSYGISW |
| | VRQAPGQGLEWMGWISAYNGNTNYAQKLQGRVTM |
| | TTDTSTSTAYMELRSLRSDDTAVYYCARGGDLSHYY |
| | YYLDVWGKGTTVTVSSGGGGSGGGGSGGGGSGGQT |
| | VVTQEPSLTVSPGGTVTLTCASSTGAVTSGYYPNWF |
| | QQKPGQAPRALIYSTSNKHSWTPARFSGSLLGGKAA |
| | LTLSGVQPEDEAEYYCLLYYGGAQWVFGGGTKLTV |
| | L (SEQ ID NO: 622) |
| 23 | EVQLVESGGGLVQPGGSLRLSCAASGFTVSSNYMSW |
| | VRQAPGKGLEWVSVIYSGGSTYYADSVKGRFTISRD |
| | NSKNTLYLQMNSLRAEDTAVYYCARATLLSLSYDAF |
| | DIWGQGTMVTVSSGGGGSGGGGSGGGGSGGDIQMT |
| | QSPSSLSASVGDRVTITCRASQSISSYLNWYQQKPGK |
| | APKLLIYAASSLQSGVPSRFSGSGSGTDFTLTISSLQPE |
| | DFATYYCQQSYSTPLTFGGGTKVEIK (SEQ ID NO: |
| | 623) |
| 24 | QVQLVQSGAEVKKPGASVKVSCKASGYTFTSYGISW |
| | VRQAPGQGLEWMGWISAYNGNTNYAQKLQGRVTM |
| | TTDTSTSTAYMELRSLRSDDTAVYYCARGGDLSHYY |
| | YMDVWGKGTTVTVSSGGGGSGGGGSGGGGSGGQT |
| | VVTQEPSLTVSPGGTVTLTCASSTGAVTSGYYPNWF |
| | QQKPGQAPRALIYSTSNKHSWTPARFSGSLLGGKAA |
| | LTLSGVQPEDEAEYYCLLYYGGAQWVFGGGTKLTV |
| | L (SEQ ID NO: 624) |
| 25 | EVQLVQSGAEVKKPGESLKISCKGSGYSFTSYWIGW |
| | VRQMPGKGLEWMGIIYPGDSDTRYSPSFQGQVTISAD |
| | KSISTAYLQWSSLKASDTAMYYCARERDRWFDPWG |
| | QGTLVTVSSGGGGSGGGGSGGGGSGGDIQMTQSPSS |
| | LSASVGDRVTITCRASQSISSYLNWYQQKPGKAPKLL |
| | IYAASSLQSGVPSRFSGSGSGTDFTLTISSLQPEDFATY |
| | YCQQSYSTPLTFGGGTKVEIK (SEQ ID NO: 625) |
| 26 | QVQLVQSGAEVKKPGASVKVSCKASGYTFTSYGISW |
| | VRQAPGQGLEWMGWISAYNGNTNYAQKLQGRVTM |
| | TTDTSTSTAYMELRSLRSDDTAVYYCARETPPSLGAF |
| | DIWGQGTMVTVSSGGGGSGGGGSGGGGSGGQSALT |
| | QPPSASGSPGQSVTISCTGTSSDVGGYNYVSWYQQHP |
| | GKAPKLMIYEVSKRPSGVPDRFSGSKSGNTASLTVSG |
| | LQAEDEADYYCSSYAGSNNWVFGGGTKLTVL (SEQ |
| | ID NO: 626) |
| 27 | QLQLQESGPGLVKPSETLSLTCTVSGGSISSSSYYWG |
| | WIRQPPGKGLEWIGSIYYSGSTYYNPSLKSRVTISVDT |
| | SKNQFSLKLSSVTAADTAVYYCAREAYCLSDSYWYF |
| | DLWGRGTLVTVSSGGGGSGGGGSGGGGSGGQSVLT |
| | QPPSASGTPGQRVTISCSGSSSNIGSNTVNWYQQLPG |
| | TAPKLLIYSNNQRPSGVPDRFSGSKSGTSASLAISGLQ |
| | SEDEADYYCAAWDDSLNGWVFGGGTKLTVL (SEQ |
| | ID NO: 627) |
| 28 | QVQLQESGPGLVKPSQTLSLTCTVSGGSISSGGYYWS |
| | WIRQPPGKGLEWIGYIYYSGSTYYNPSLKSRVTISVDT |
| | SKNQFSLKLSSVTAADTAVYYCARESWKYFYPRGY |
| | MDVWGKGTTVTVSSGGGGSGGGGSGGGGSGGDIQ |
| | MTQSPSSLSASVGDRVTITCRASQSISSYLNWYQQKP |
| | GKAPKLLIYAASSLQSGVPSRFSGSGSGTDFTLTISSL |
| | QPEDFATYYCQQSYSTPLTFGGGTKVEIK (SEQ ID |
| | NO: 628) |

HLA-A*01 scFv Sequences

| | |
|---|---|
| A1-9 | QVQLVQSGAEVKKPGASVKVSCKASGYTFTSYGISW |
| | VRQAPGQGLEWMGWISAYNGNTNYAQKLQGRVTM |
| | TTDTSTSTAYMELRSLRSDDTAVYYCARGGWTAWY |
| | YYMDVWGKGTTVTVSSGGGGSGGGGSGGGGSGGQ |
| | TVVTQEPSLTVSPGGTVTLTCASSTGAVTSGYYPNWF |
| | QQKPGQAPRALIYSTSNKHSWTPARFSGSLLGGKAA |
| | LTLSGVQPEDEAEYYCLLYYGGAQWVFGGGTKLTV |
| | L (SEQ ID NO: 629) |
| A1-8 | EVQLVESGGGLVQPGGSLRLSCAASGFTFSSYSMNW |
| | VRQAPGKGLEWVSYISSSSSTIYYADSVKGRFTISRD |
| | NAKNSLYLQMNSLRAEDTAVYYCARAKYYYMDVW |
| | GKGTTVTVSSGGGGSGGGGSGGGGSGGQSVLTQPPS |
| | ASGTPGQRVTISCSGSSSNIGSNTVNWYQQLPGTAPK |
| | LLIYSNNQRPSGVPDRFSGSKSGTSASLAISGLQSEDE |
| | ADYYCAAWDDSLNGWVFGGGTKLTVL (SEQ ID NO: |
| | 630) |
| A1-7 | QVQLQESGPGLVKPSQTLSLTCTVSGGSISSGGYYWS |
| | WIRQPPGKGLEWIGYIYYSGSTYYNPSLKSRVTISVDT |
| | SKNQFSLKLSSVTAADTAVYYCARDQVDKNTYYYY |
| | MDVWGKGTTVTVSSGGGGSGGGGSGGGGSGGDIQ |
| | MTQSPSSLSASVGDRVTITCRASQSISSYLNWYQQKP |
| | GKAPKLLIYAASSLQSGVPSRFSGSGSGTDFTLTISSL |
| | QPEDFATYYCQQSYSTPLTFGGGTKVEIK (SEQ ID |
| | NO: 631) |
| A1-6 | QVQLVESGGGLVKPGGSLRLSCAASGFTFSDYYMSW |
| | IRQAPGKGLEWVSYISSSGSTIYYADSVKGRFTISRDN |
| | AKNSLYLQMNSLRAEDTAVYYCARACQLAEYFQHW |
| | GQGTLVTVSSGGGGSGGGGSGGGGSGGDIQMTQSPS |
| | SVSASVGDRVTITCRASQGISSWLAWYQQKPGKAPK |
| | LLIYAASSLQSGVPSRFSGSGSGTDFTLTISSLQPEDFA |
| | TYYCQQANSFPLTFGGGTKVEIK (SEQ ID NO: 632) |
| A1-5 | QVQLQESGPGLVKPSQTLSLTCTVSGGSISSGGYYWS |
| | WIRQPPGKGLEWIGYIYYSGSTYYNPSLKSRVTISVDT |
| | SKNQFSLKLSSVTAADTAVYYCARDRVDKNTSYYY |
| | MDVWGKGTTVTVSSGGGGSGGGGSGGGGSGGDIQ |
| | MTQSPSSLSASVGDRVTITCRASQSISSYLNWYQQKP |
| | GKAPKLLIYAASSLQSGVPSRFSGSGSGTDFTLTISSL |
| | QPEDFATYYCQQSYSTPLTFGGGTKVEIK (SEQ ID |
| | NO: 633) |
| A1-4 | QVQLQESGPGLVKPSDTLSLTCAVSGYSISSSNWWG |
| | WIRQPPGKGLEWIGYIYYSGSTYYNPSLKSRVTMSVD |
| | TSKNQFSLKLSSVTAVDTAVYYCARRVQLKLVHWF |
| | DPWGQGTLVTVSSGGGGSGGGGSGGGGSGGDIQMT |
| | QSPSSLSASVGDRVTITCRASQSISSYLNWYQQKPGK |
| | APKLLIYAASSLQSGVPSRFSGSGSGTDFTLTISSLQPE |
| | DFATYYCQQSYSTPLTFGGGTKVEIK (SEQ ID NO: |
| | 634) |
| A1-3 | QVQLVQSGAEVKKPGASVKVSCKASGYTFTSYDINW |
| | VRQATGQGLEWMGWMNPNSGNTGYAQKFQGRVT |
| | MTRNTSISTAYMELSSLRSEDTAVYYCATYYDYVTV |
| | FYFQHWGQGTLVTVSSGGGGSGGGGSGGGGSGGDI |
| | QMTQSPSSLSASVGDRVTITCRASQSISSYLNWYQQK |
| | PGKAPKLLIYAASSLQSGVPSRFSGSGSGTDFTLTISSL |
| | QPEDFATYYCQQSYSTPLTFGGGTKVEIK (SEQ ID |
| | NO: 635) |
| A1-2 | QLQLQESGSGLVKPSQTLSLTCAVSGGSISSGGYSWS |
| | WIRQPPGKGLEWIGYIYHSGSTYYNPSLKSRVTISVD |
| | RSKNQFSLKLSSVTAADTAVYYCARESYPSFYAFDIW |
| | GQGTMVTVSSGGGGSGGGGSGGGGSGGDIQMTQSP |
| | SSLSASVGDRVTITCRASQSISSYLNWYQQKPGKAPK |
| | LLIYAASSLQSGVPSRFSGSGSGTDFTLTISSLQPEDFA |
| | TYYCQQSYSTPLTFGGGTKVEIK (SEQ ID NO: 636) |
| A1-1 | QITLKESGPTLVKPTQTLTLTCTFSGFSLSTSGVGVGW |
| | IRQPPGKALEWLALIYWNDDKRYSPSLKSRLTITKDT |
| | SKNQVVLTMTNMDPVDTATYYCAHSNMWSYSLND |
| | YYFDYWGQGTLVTVSSGGGGSGGGGSGGGGSGGDI |
| | QMTQSPSSLSASVGDRVTITCRASQSISSYLNWYQQK |
| | PGKAPKLLIYAASSLQSGVPSRFSGSGSGTDFTLTISSL |
| | QPEDFATYYCQQSYSTPLTFGGGTKVEIK (SEQ ID |
| | NO: 637) |

[0270] In some embodiments, the ligand binding domain of the second, inhibitory receptor comprises an scFv. In some embodiments, the scFv binds to HLA-A*01, HLA-A*02, HLA-A*3, HLA-A*11, HLA-B*07 or HLA-C*07, and comprises a sequence selected from the group of sequences set forth in Table 5, or a sequence having at least 80%, at least 85%, at least 90%, at least 95%, at least 97% or at least 99% identity thereto. In some embodiments, the scFv binds to HLA-A*01, HLA-A*02, HLA-A*3, HLA-A*11, HLA-B*07 or HLA-C*07, and comprises a sequence selected from the group of sequences set forth in Table 5. In some embodiments, the non-target antigen comprises HLA-A*01, and the non-target extracellular ligand binding domain of the second receptor comprises an HLA-A*01 scFv sequence set forth in Table 5, or a sequence having at least 80%, at least 85%, at least 90%, at least 95%, at least 97% or at least 99% identity thereto. In some embodiments, the non-target antigen comprises HLA-A*02, and the non-target extracellular ligand binding domain of the second receptor comprises an HLA-A*02 scFv sequence set forth in Table 5, or a sequence having at least 80%, at least 85%, at least 90%, at least 95%, at least 97% or at least 99% identity thereto. In some embodiments, the non-target antigen comprises HLA-A*03, and the non-target extracellular ligand binding domain of the second receptor comprises an HLA-A*03 scFv sequence set forth in Table 5, or a sequence having at least 80%, at least 85%, at least 90%, at least 95%, at least 97% or at least 99% identity thereto. In some embodiments, the non-target antigen comprises HLA-A*11, and the non-target extracellular ligand binding domain of the second receptor comprises an HLA-A*11 scFv sequence set forth in Table 5, or a sequence having at least 80%, at least 85%, at least 90%, at least 95%, at least 97% or at least 99% identity thereto. In some embodiments, the non-target antigen comprises HLA-B*07, and the non-target extracellular ligand binding domain of the second receptor comprises an HLA-B*07 scFv sequence set forth in Table 5, or a sequence having at least 80%, at least 85%, at least 90%, at least 95%, at least 97% or at least 99% identity thereto. In some embodiments, the non-target antigen comprises HLA-C*07, and the non-target extracellular ligand binding domain of the second receptor comprises an HLA-C*07 scFv sequence set forth in Table 5, or a sequence having at least 80%, at least 85%, at least 90%, at least 95%, at least 97% or at least 99% identity thereto.

[0271] Exemplary heavy chain and light chain CDRs (CDR-H1, CDR-H2 and CDR-H3, or CDR-L1, CDR-L2 and CDR-L3, respectively) for HLA-A*01, HLA-A*02, HLA-A*03, HLA-A*11, HLA-B*07 and HLA-C*07 ligand binding domains are shown in Table 6 below.

TABLE 6
CDRs corresponding to HLA antigen binding domains CDR-H3

| CDR-L1 | CDR-L2 | CDR-L3 | CDR-H1 | CDR-H2 | CDR-H3 |
|---|---|---|---|---|---|
| RSSQSIVHSNGNTYLE | KVSNRFSGVPDR | FQGSHVP | ASGYTFTSYHIH | WIYPGNVNTEYNEKFK | EEITYAMDY |
| (SEQ ID NO: 42) | (SEQ ID NO: 43) | RT | (SEQ ID NO: 45) | GK | (SEQ ID |
| | | (SEQ ID | | (SEQ ID NO: 46) | NO: 47) |
| | | NO: 44) | | | |
| RSSQSIVHSNGNTYLD | KVSNRFSGVPDR | MQGSHVP | SGYTFTSYHMH | WIYPGDGSTQYNEKFK | EGTYYAMDY |
| (SEQ ID NO: 48) | (SEQ ID NO: 49) | RT | (SEQ ID NO: 51) | G | (SEQ ID |
| | | (SEQ ID | | (SEQ ID NO: 52) | NO: 53) |
| | | NO: 50) | | | |

HLA-A*03 CDRs

| | | | | | |
|---|---|---|---|---|---|
| RASQSISSYLN | AASSLQS | QQSYSTP | SYGIS | WISAYNGNTNYAQKLQ | ERVSQRGAFD |
| (SEQ ID NO: 638) | (SEQ ID NO: 645) | LT | (SEQ ID NO: 657) | G | I |
| | | (SEQ ID | | (SEQ ID NO: 676) | (SEQ ID |
| | | NO: 650) | | | NO: 693) |
| RASQSISSYLN | AASSLQS | QQSYSTP | SYSMN | YISSSSTIYYADSVKG | GNPDKDPFDY |
| (SEQ ID NO: 638) | (SEQ ID NO: 645) | LT | (SEQ ID NO: 658) | (SEQ ID NO: 677) | (SEQ ID |
| | | (SEQ ID | | | NO: 694) |
| | | NO: 650) | | | |
| RASQSISSYLN | AASSLQS | QQSYSTP | SGSYYWS | YIYYSGSTNYNPSLKS | DFYCTNWYFDL |
| (SEQ ID NO: 638) | (SEQ ID NO: 645) | LT | (SEQ ID NO: 659) | (SEQ ID NO: 678) | (SEQ ID |
| | | (SEQ ID | | | NO: 695) |
| | | NO: 650) | | | |
| RASQSISSYLN | AASSLQS | QQSYSTP | SYYWS | YIYYSGSTNYNPSLKS | ESSSGSYWYFD |
| (SEQ ID NO: 638) | (SEQ ID NO: 645) | LT | (SEQ ID NO: 660) | (SEQ ID NO: 678) | L |
| | | (SEQ ID | | | (SEQ ID |
| | | NO: 650) | | | NO: 696) |
| RASQSISSYLN | AASSLQS | QQSYSTP | SYWIG | IIYPGDSDTRYSPSFQ | DSGYKYNLYYY |
| (SEQ ID NO: 638) | (SEQ ID NO: 645) | LT | (SEQ ID NO: 661) | G | YYYMDV |
| | | (SEQ ID | | (SEQ ID NO: 679) | (SEQ ID |
| | | NO: 650) | | | NO: 697) |
| ASSTGAVTSGYYPN | STSNKHS | LLYYGGA | SYGIS | WISAYNGNTNYAQKLQ | GGDLSHYYYYM |
| (SEQ ID NO: 639) | (SEQ ID NO: 646) | QWV | (SEQ ID NO: 657) | G | DV |
| | | (SEQ ID | | (SEQ ID NO: 676) | (SEQ ID |
| | | NO: 651) | | | NO: 698) |
| RASQSISSYLN | AASSLQS | QQSYSTP | SYGIS | WISAYNGNTNYAQKLQ | ENRRYNSCYYF |
| (SEQ ID NO: 638) | (SEQ ID NO: 645) | LT | (SEQ ID NO: 657) | G | DY |
| | | (SEQ ID | | (SEQ ID NO: 676) | (SEQ ID |
| | | NO: 650) | | | NO: 699) |
| ASSTGAVTSGYYPN | STSNKHS | LLYYGGA | SYGIS | WISAYNGNTNYAQKLQ | GGDLSHYYYYL |
| (SEQ ID NO: 639) | (SEQ ID NO: 646) | QWV | (SEQ ID NO: 657) | G | DV |
| | | (SEQ ID | | (SEQ ID NO: 676) | (SEQ ID |
| | | NO: 651) | | | NO: 700) |
| RASQSISSYLN | AASSLQS | QQSYSTP | SNYMS | VIYSGGSTYYADSVKG | ATLLSLSYDAF |
| (SEQ ID NO: 638) | (SEQ ID NO: 645) | LT | (SEQ ID NO: 662) | (SEQ ID NO: 680) | DI |
| | | (SEQ ID | | | (SEQ ID |
| | | NO: 650) | | | NO: 701) |
| ASSTGAVTSGYYPN | STSNKHS | LLYYGGA | SYGIS | WISAYNGNTNYAQKLQ | GGDLSHYYYMD |
| (SEQ ID NO: 639) | (SEQ ID NO: 646) | QWV | (SEQ ID NO: 657) | G | V |
| | | (SEQ ID | | (SEQ ID NO: 676) | (SEQ ID |
| | | NO: 651) | | | NO: 702) |
| RASQSISSYLN | AASSLQS | QQSYSTP | SYWIG | IIYPGDSDTRYSPSFQ | ERDRWFDP |
| (SEQ ID NO: 638) | (SEQ ID NO: 645) | LT | (SEQ ID NO: 661) | G | (SEQ ID |
| | | (SEQ ID | | (SEQ ID NO: 679) | NO: 703) |
| | | NO: 650) | | | |
| TGTSSDVGGYNYVS | EVSKRPS | SSYAGSN | SYGIS | WISAYNGNTNYAQKLQ | ETPPSLGAFDI |
| (SEQ ID NO: 640) | (SEQ ID NO: 647) | NWV | (SEQ ID NO: 657) | G | (SEQ ID |
| | | (SEQ ID | | (SEQ ID NO: 676) | NO: 704) |
| | | NO: 652) | | | |
| SGSSSNIGSNTVN | SNNQRPS | AAWDDSL | SSSYYWG | SIYYSGSTYYNPSLKS | EAYCLSDSYWY |
| (SEQ ID NO: 641) | (SEQ ID NO: 648) | N | (SEQ ID NO: 663) | (SEQ ID NO: 681) | FDL |
| | | (SEQ ID | | | (SEQ ID |
| | | NO: 653) | | | NO: 705) |
| RASQSISSYLN | AASSLQS | QQSYSTP | SGGYYWS | YIYYSGSTYYNPSLKS | ESWKYFYPRGY |
| (SEQ ID NO: 638) | (SEQ ID NO: 645) | LT | (SEQ ID NO: 664) | (SEQ ID NO: 682) | MDV |
| | | (SEQ ID | | | (SEQ ID |
| | | NO: 650) | | | NO: 706) |

HLA-B*07 CDRs

| | | | | | |
|---|---|---|---|---|---|
| RASENIYSNLA | AATYLPD | QHFWVTP | SGYSWH | YIHFSGSTHYHPSLKS | GGVVSHYAMDC |
| (SEQ ID NO: 642) | (SEQ ID NO: 649) | YT | (SEQ ID NO: 665) | (SEQ ID NO: 683) | (SEQ ID |
| | | (SEQ ID | | | NO: 707) |
| | | NO: 654) | | | |

HLA-C*07 CDRs

| | | | | | |
|---|---|---|---|---|---|
| RASQSISSYLN | AASSLQS | QQSYSTP | SYAMS | AISGSGGSTYYADSVK | SFDWFDP |
| (SEQ ID NO: 638) | (SEQ ID NO: 645) | LT | (SEQ ID NO: 668) | G | (SEQ ID |
| | | (SEQ ID | | (SEQ ID NO: 686) | NO: 708) |
| | | NO: 650) | | | |
| RASQSISSYLN | AASSLQS | QQSYSTP | SGGYYWS | YIYYSGSTYYNPSLKS | ERSISPYYYYY |
| (SEQ ID NO: 638) | (SEQ ID NO: 645) | LT | (SEQ ID NO: 664) | (SEQ ID NO: 682) | MDV |
| | | (SEQ ID | | | (SEQ ID |
| | | NO: 650) | | | NO: 709) |
| SGSSSNIGSNTVN | SNNQRPS | AAWDDSL | SSSYYWG | SIYYSGSTYYNPSLKS | DSVIWYWFDP |
| (SEQ ID NO: 641) | (SEQ ID NO: 648) | N | (SEQ ID NO: 663) | (SEQ ID NO: 681) | (SEQ ID |
| | | (SEQ ID | | | NO: 710) |
| | | NO: 653) | | | |
| RASQSISSYLN | AASSLQS | QQSYSTP | SGGYYWS | YIYYSGSTYYNPSLKS | EEILPRLSYYY |
| (SEQ ID NO: 638) | (SEQ ID NO: 645) | LT | (SEQ ID NO: 664) | (SEQ ID NO: 682) | YMDV |
| | | (SEQ ID | | | (SEQ ID |
| | | NO: 650) | | | NO: 711) |
| RASQSISSYLN | AASSLQS | QQSYSTP | SYAMN | WINTNTGNPTYAQGFT | GGRAHSSWYFD |
| (SEQ ID NO: 638) | (SEQ ID NO: 645) | LT | (SEQ ID NO: 669) | G | L |
| | | (SEQ ID | | (SEQ ID NO: 687) | (SEQ ID |
| | | NO: 650) | | | NO: 712) |
| RASQSISSYLN | AASSLQS | QQSYSTP | SGGYYWS | YIYYSGSTYYNPSLKS | DRIKILPRLGY |
| (SEQ ID NO: 638) | (SEQ ID NO: 645) | LT | (SEQ ID NO: 664) | (SEQ ID NO: 682) | YYYMDV |
| | | (SEQ ID | | | (SEQ ID |
| | | NO: 650) | | | NO: 713) |
| RASQSISSYLN | AASSLQS | QQSYSTP | SGGYYWS | YIYYSGSTYYNPSLKS | DTVIHYYYYMD |
| (SEQ ID NO: 638) | (SEQ ID NO: 645) | LT | (SEQ ID NO: 664) | (SEQ ID NO: 682) | V |
| | | (SEQ ID | | | (SEQ ID |
| | | NO: 650) | | | NO: 714) |
| RASQSISSYLN | AASSLQS | QQSYSTP | SGGYYWS | YIYYSGSTYYNPSLKS | DVIVEVFLSYY |
| (SEQ ID NO: 638) | (SEQ ID NO: 645) | LT | (SEQ ID NO: 664) | (SEQ ID NO: 682) | YYMDV |
| | | (SEQ ID | | | (SEQ ID |
| | | NO: 650) | | | NO: 715) |
| RASQSISSYLN | AASSLQS | QQSYSTP | SGGYYWS | YIYYSGSTYYNPSLKS | DIFIHYYYYMD |
| (SEQ ID NO: 638) | (SEQ ID NO: 645) | LT | (SEQ ID NO: 664) | (SEQ ID NO: 682) | V |
| | | (SEQ ID | | | (SEQ ID |
| | | NO: 650) | | | NO: 716) |
| RASQSISSYLN | AASSLQS | QQSYSTP | SYSMN | YISSSSSTIYYADSVK | DGTFYSYSPYY |
| (SEQ ID NO: 638) | (SEQ ID NO: 645) | LT | (SEQ ID NO: 658) | G | FDY |
| | | (SEQ ID | | (SEQ ID NO: 677) | (SEQ ID |
| | | NO: 650) | | | NO: 717) |
| RASQSISSYLN | AASSLQS | QQSYSTP | SGGYYWS | YIYYSGSTYYNPSLKS | EWIKILPRLGY |
| (SEQ ID NO: 638) | (SEQ ID NO: 645) | LT | (SEQ ID NO: 664) | (SEQ ID NO: 682) | YYYMDV |
| | | (SEQ ID | | | (SEQ ID |
| | | NO: 650) | | | NO: 718) |
| RASQSISSYLN | AASSLQS | QQSYSTP | SGGYYWS | YIYYSGSTYYNPSLKS | DRSLYYYYYMD |
| (SEQ ID NO: 638) | (SEQ ID NO: 645) | LT | (SEQ ID NO: 664) | (SEQ ID NO: 682) | V |
| | | (SEQ ID | | | (SEQ ID |
| | | NO: 650) | | | NO: 719) |
| RASQSISSYLN | AASSLQS | QQSYSTP | SGGYYWS | YIYYSGSTYYNPSLKS | DKILAPNYYYY |
| (SEQ ID NO: 638) | (SEQ ID NO: 645) | LT | (SEQ ID NO: 664) | (SEQ ID NO: 682) | MDV |
| | | (SEQ ID | | | (SEQ ID |
| | | NO: 650) | | | NO: 720) |
| RASQSISSYLN | AASSLQS | QQSYSTP | SGGYYWS | YIYYSGSTYYNPSLKS | EKSWKYFYYYY |
| (SEQ ID NO: 638) | (SEQ ID NO: 645) | LT | (SEQ ID NO: 664) | (SEQ ID NO: 682) | YYMDV |
| | | (SEQ ID | | | (SEQ ID |
| | | NO: 650) | | | NO: 721) |
| RASQSISSYLN | AASSLQS | QQSYSTP | SGGYYWS | YIYYSGSTYYNPSLKS | ENTSTIPYYYY |
| (SEQ ID NO: 638) | (SEQ ID NO: 645) | LT | (SEQ ID NO: 664) | (SEQ ID NO: 682) | YMDV |
| | | (SEQ ID | | | (SEQ ID |
| | | NO: 650) | | | NO: 722) |
| RASQSISSYLN | AASSLQS | QQSYSTP | SGGYYWS | YIYYSGSTYYNPSLKS | EDVDKNTSTIY |
| (SEQ ID NO: 638) | (SEQ ID NO: 645) | LT | (SEQ ID NO: 664) | (SEQ ID NO: 682) | YYYYYMDV |
| | | (SEQ ID | | | (SEQ ID |
| | | NO: 650) | | | NO: 723) |
| RASQGISSALA | DASSLES | QQFNSYPL | DYYMS | YISSSGSTIYYADSVK | DGGDIVSSSAI |
| (SEQ ID NO: 643) | (SEQ ID NO: 55) | T | (SEQ ID NO: 670) | G | YWYFDL |
| | | (SEQ ID | | (SEQ ID NO: 688) | (SEQ ID |
| | | NO: 60) | | | NO: 724) |
| RASQSISSYLN | AASSLQS | QQSYSTP | SGGYYWS | YIYYSGSTYYNPSLKS | DLILPPYYYYY |
| (SEQ ID NO: 638) | (SEQ ID NO: 645) | LT | (SEQ ID NO: 664) | (SEQ ID NO: 682) | MDV |
| | | (SEQ ID | | | (SEQ ID |
| | | NO: 650) | | | NO: 725) |
| RASQSISSYLN | AASSLQS | QQSYSTP | SGGYYWS | YIYYSGSTYYNPSLKS | ETWIKILPRYY |
| (SEQ ID NO: 638) | (SEQ ID NO: 645) | LT | (SEQ ID NO: 664) | (SEQ ID NO: 682) | YYYYYMDV |
| | | (SEQ ID | | | (SEQ ID |
| | | NO: 650) | | | NO: 726) |
| RASQSISSYLN | AASSLQS | QQSYSTP | SGGYYWS | YIYYSGSTYYNPSLKS | DLSRYYYYYMD |
| (SEQ ID NO: 638) | (SEQ ID NO: 645) | LT | (SEQ ID NO: 664) | (SEQ ID NO: 682) | V |
| | | (SEQ ID | | | (SEQ ID |
| | | NO: 650) | | | NO: 727) |
| RASQGISSWLA | AASSLQS | QQYNSYP | | | |
| (SEQ ID NO: 644) | (SEQ ID NO: 645) | LT | SYSMN | YIYYYYYTIYYADSVK | EHIVLCFDY |
| | | (SEQ ID | (SEQ ID NO: 658) | G | (SEQ ID |
| | | NO: 655) | | (SEQ ID NO: 677) | NO: 728) |
| RASQSISSYLN | AASSLQS | QQSYSTP | SGGYYWS | YIYYSGSTYYNPSLKS | DKILPRPYYYY |
| (SEQ ID NO: 638) | (SEQ ID NO: 645) | LT | (SEQ ID NO: 664) | (SEQ ID NO: 682) | MDV |
| | | (SEQ ID | | | (SEQ ID |
| | | NO: 650) | | | NO: 729) |
| TGTSSDVGGYNYVS | EVSKRPS | SSYAGSN | SYGIS | WISAYNGNTNYAQKLQ | GSNEYFQH |
| (SEQ ID NO: 640) | (SEQ ID NO: 647) | N | (SEQ ID NO: 657) | G | (SEQ ID |
| | | (SEQ ID | | (SEQ ID NO: 676) | NO: 730) |
| | | NO: 652) | | | |
| RASQSISSYLN | AASSLQS | QQSYSTP | SGGYYWS | WINTNTGNPTYAQGFT | GTSYWYFDL |
| (SEQ ID NO: 638) | (SEQ ID NO: 645) | LT | (SEQ ID NO: 664) | G | (SEQ ID |
| | | (SEQ ID | | (SEQ ID NO: 687) | NO: 731) |
| | | NO: 650) | | | |
| RASQSISSYLN | AASSLQS | QQSYSTP | SGGYYWS | YIYYSGSTYYNPSLKS | EEIVEVFYYYY |
| (SEQ ID NO: 638) | (SEQ ID NO: 645) | LT | (SEQ ID NO: 664) | (SEQ ID NO: 682) | MDV |
| | | (SEQ ID | | | (SEQ ID |
| | | NO: 650) | | | NO: 732) |
| RASQSISSYLN | AASSLQS | QQSYSTP | SYAMS | AISGSGGSTYYADSVK | VDDYYFDY |
| (SEQ ID NO: 638) | (SEQ ID NO: 645) | LT | (SEQ ID NO: 668) | G | (SEQ ID |
| | | (SEQ ID | | (SEQ ID NO: 686) | NO: 733) |
| | | NO: 650) | | | |
| RASQSISSYLN | AASSLQS | QQSYSTP | SYWMH | RINSDGSSTSYADSVK | STNILLSYTKA |
| (SEQ ID NO: 638) | (SEQ ID NO: 645) | LT | (SEQ ID NO: 667) | G | FDI |
| | | (SEQ ID | | (SEQ ID NO: 685) | (SEQ ID |
| | | NO: 650) | | | NO: 734) |
| RASQSISSYLN | AASSLQS | QQSYSTP | | | |
| (SEQ ID NO: 638) | (SEQ ID NO: 645) | LT | SGGYYWS | YIYYSGSTYYNPSLKS | DKTYYYYYYMD |
| | | (SEQ ID | (SEQ ID NO: 664) | (SEQ ID NO: 682) | V |
| | | NO: 650) | | | (SEQ ID |
| | | | | | NO: 735) |
| RASQSISSYLN | AASSLQS | QQSYSTP | SGGYYWS | YIYYSGSTYYNPSLKS | EKYFHDKYFHD |
| (SEQ ID NO: 638) | (SEQ ID NO: 645) | LT | (SEQ ID NO: 664) | (SEQ ID NO: 682) | YYYYYMDV |
| | | (SEQ ID | | | (SEQ ID |
| | | NO: 650) | | | NO: 736) |
| RASQSISSYLN | AASSLQS | QQSYSTP | SGGYYWS | YIYYSGSTYYNPSLKS | DTSVYYYYYMD |
| (SEQ ID NO: 638) | (SEQ ID NO: 645) | LT | (SEQ ID NO: 664) | (SEQ ID NO: 682) | V |
| | | (SEQ ID | | | (SEQ ID |
| | | NO: 650) | | | NO: 737) |
| RASQSISSYLN | AASSLQS | QQSYSTP | SGGYYWS | YIYYSGSTYYNPSLKS | EKILPYYYYYY |
| (SEQ ID NO: 638) | (SEQ ID NO: 645) | LT | (SEQ ID NO: 664) | (SEQ ID NO: 682) | MDV |
| | | (SEQ ID | | | (SEQ ID |
| | | NO: 650) | | | NO: 738) |
| SGSSSNIGSNTVN | SNNQRPS | AAWDDSL | SYSMN | YISSSSSTIYYADSVK | QWIYIYINPRG |
| (SEQ ID NO: 641) | (SEQ ID NO: 648) | NGWV | (SEQ ID NO: 658) | G | FIFLHDAFDI |
| | | (SEQ ID | | (SEQ ID NO: 677) | (SEQ ID |
| | | NO: 653) | | | NO: 739) |
| RASQSISSYLN | AASSLQS | QQSYSTP | SNSAAWN | RTYYRSKWYNDYAVSV | EDVDFHHDAFD |
| (SEQ ID NO: 638) | (SEQ ID NO: 645) | LT | (SEQ ID NO: 671) | KS | I |
| | | (SEQ ID | | (SEQ ID NO: 689) | (SEQ ID |
| | | NO: 650) | | | NO: 740) |
| RASQSISSYLN | AASSLQS | QQSYSTP | SGGYYWS | YIYYSGSTYYNPSLKS | EGVDKNTSTIY |
| (SEQ ID NO: 638) | (SEQ ID NO: 645) | LT | (SEQ ID NO: 664) | (SEQ ID NO: 682) | YYYYYMDV |
| | | (SEQ ID | | | (SEQ ID |
| | | NO: 650) | | | NO: 741) |
| RASQGISSWLA | AASSLQS | QQYNSYP | SYSMN | YISSSSSTIYYADSVK | DRRGYFDL |
| (SEQ ID NO: 644) | (SEQ ID NO: 645) | LT | (SEQ ID NO: 658) | G | (SEQ ID |
| | | (SEQ ID | | (SEQ ID NO: 677) | NO: 742) |
| | | NO: 655) | | | |
| RASQSISSYLN | AASSLQS | QQSYSTP | DYYMH | LVDPEDGETIYAEKFQ | GIHVDIRSMED |
| (SEQ ID NO: 638) | (SEQ ID NO: 645) | LT | (SEQ ID NO: 672) | G | WFDP |
| | | (SEQ ID | | (SEQ ID NO: 690) | (SEQ ID |
| | | NO: 650) | | | NO: 743) |
| RASQSISSYLN | AASSLQS | QQSYSTP | SGGYYWS | YIYYSGSTYYNPSLKS | DIGTSYYYYMD |
| (SEQ ID NO: 638) | (SEQ ID NO: 645) | LT | (SEQ ID NO: 664) | (SEQ ID NO: 682) | V |
| | | (SEQ ID | | | (SEQ ID |
| | | NO: 650) | | | NO: 744) |
| RASQSISSYLN | AASSLQS | QQSYSTP | SGGYYWS | YIYYSGSTYYNPSLKS | EVVEVFLYYYY |
| (SEQ ID NO: 638) | (SEQ ID NO: 645) | LT | (SEQ ID NO: 664) | (SEQ ID NO: 682) | YMDV |
| | | (SEQ ID | | | (SEQ ID |
| | | NO: 650) | | | NO: 745) |
| RASQSISSYLN | AASSLQS | QQSYSTP | SGGYYWS | YIYYSGSTYYNPSLKS | DLYYYYYYYMD |
| (SEQ ID NO: 638) | (SEQ ID NO: 645) | LT | (SEQ ID NO: 664) | (SEQ ID NO: 682) | V |
| | | (SEQ ID | | | (SEQ ID |
| | | NO: 650) | | | NO: 746) |
| RASQSISSYLN | AASSLQS | QQSYSTP | SGGYYWS | YIYYSGSTYYNPSLKS | ESWKYFYPRGS |
| (SEQ ID NO: 638) | (SEQ ID NO: 645) | LT | (SEQ ID NO: 664) | (SEQ ID NO: 682) | IFIHYYYYMDV |
| | | (SEQ ID | | | (SEQ ID |
| | | NO: 650) | | | NO: 747) |
| RASQSISSYLN | AASSLQS | QQSYSTP | SGGYYWS | YIYYSGSTYYNPSLKS | DRIVEVFYYYY |
| (SEQ ID NO: 638) | (SEQ ID NO: 645) | LT | (SEQ ID NO: 664) | (SEQ ID NO: 682) | MDV |
| | | (SEQ ID | | | (SEQ ID |
| | | NO: 650) | | | NO: 748) |
| RASQSISSYLN | AASSLQS | QQSYSTP | SGGYYWS | YIYYSGSTYYNPSLKS | EKYFHDWLYYY |
| (SEQ ID NO: 638) | (SEQ ID NO: 645) | LT | (SEQ ID NO: 664) | (SEQ ID NO: 682) | YYMDV |
| | | (SEQ ID | | | (SEQ ID |
| | | NO: 650) | | | NO: 749) |
| RASQSISSYLN | AASSLQS | QQSYSTP | SGGYYWS | YIYYSGSTYYNPSLKS | DLVDKNTSYYY |
| (SEQ ID NO: 638) | (SEQ ID NO: 645) | LT | (SEQ ID NO: 664) | (SEQ ID NO: 682) | YYMDV |
| | | (SEQ ID | | | (SEQ ID |
| | | NO: 650) | | | NO: 750) |
| TGTSSDVGGYNYVS | EVSKRPS | SSYAGSN | SYGIS | WISAYNGNTNYAQKLQ | VQNEYFQH |
| (SEQ ID NO: 640) | (SEQ ID NO: 647) | NWV | (SEQ ID NO: 657) | G | (SEQ ID |
| | | (SEQ ID | | (SEQ ID NO: 676) | NO: 751) |
| | | NO: 652) | | | |
| RASQGISSWLA | AASSLQS | QQANSFP | DYYMS | YISSSGSTIYYADSVK | ANWFDP |
| (SEQ ID NO: 644) | (SEQ ID NO: 645) | LT | (SEQ ID NO: 670) | G | (SEQ ID |
| | | (SEQ ID | | (SEQ ID NO: 688) | NO: 752) |
| | | NO: 656) | | | |

HLA-A*01 CDRs

| | | | | | |
|---|---|---|---|---|---|
| ASSTGAVTSGYYPN | STSNKHS | LLYYGGA | SYGIS | WISAYNGNTNYAQKLQ | GGWTAWYYYMD |
| (SEQ ID NO: 639) | (SEQ DI NO: 646) | QWV | (SEQ ID NO: 657) | G | V |
| | | (SEQ ID | | (SEQ ID NO: 676) | (SEQ ID |
| | | NO: 651) | | | NO: 753) |
| SGSSSNIGSNTVN | SNNQRPS | AAWDDSL | | | |
| (SEQ ID NO: 641) | (SEQ ID NO: 648) | NGWV | SYSMN | YISSSSSTIYYADSVK | AKYYYMDV |
| | | (SEQ ID | (SEQ ID NO: 658) | G | (SEQ ID |
| | | NO: 653) | | (SEQ ID NO: 677) | NO: 754) |
| RASQSISSYLN | AASSLQS | QQSYSTP | SGGYYWS | YIYYSGSTYYNPSLKS | DQVDKNTYYYY |
| (SEQ ID NO: 638) | (SEQ ID NO: 645) | LT | (SEQ ID NO: 664) | (SEQ ID NO: 682) | MDV |
| | | (SEQ ID | | | (SEQ ID |
| | | NO: 650) | | | NO: 755) |
| RASQGISSWLA | AASSLQS | QQANSFP | DYYMS | YISSSGSTIYYADSVK | ACQLAEYFQH |
| (SEQ ID NO: 644) | (SEQ ID NO: 645) | LT | (SEQ ID NO: 670) | G | (SEQ ID |
| | | (SEQ ID | | (SEQ ID NO: 688) | NO: 756) |
| | | NO: 656) | | | |
| RASQSISSYLN | AASSLQS | QQSYSTP | SGGYYWS | YIYYSGSTYYNPSLKS | DRVDKNTSYYY |
| (SEQ ID NO: 638) | (SEQ ID NO: 645) | LT | (SEQ ID NO: 664) | (SEQ ID NO: 682) | MDV |
| | | (SEQ ID | | | (SEQ ID |
| | | NO: 650) | | | NO: 757) |
| RASQSISSYLN | AASSLQS | QQSYSTP | SSNWWG | YIYYSGSTYYNPSLKS | RVQLKLVHWFD |
| (SEQ ID NO: 638) | (SEQ ID NO: 645) | LT | (SEQ ID NO: 673) | (SEQ ID NO: 682) | P |
| | | (SEQ ID | | | (SEQ ID |
| | | NO: 650) | | | NO: 758) |
| RASQSISSYLN | AASSLQS | QQSYSTP | SYDIN | WMNPNSGNTGYAQKFQ | YYDYVTVFYFQ |
| (SEQ ID NO: 638) | (SEQ ID NO: 645) | LT | (SEQ ID NO: 674) | G | H |
| | | (SEQ ID | | (SEQ ID NO: 691) | (SEQ ID |
| | | NO: 650) | | | NO: 759) |
| RASQSISSYLN | AASSLQS | QQSYSTP | SGGYSWS | YIYHSGSTYYNPSLKS | ESYPSFYAFDI |
| (SEQ ID NO: 638) | (SEQ ID NO: 645) | LT | (SEQ ID NO: 675) | (SEQ ID NO: 692) | (SEQ ID |
| | | (SEQ ID | | | NO: 760) |
| | | NO: 650) | | | |
| RASQSISSYLN | AASSLQS | QQSYSTP | TSGVGVG | LIYWNDDKRYSPSLKS | SNMWSYSLNDY |
| (SEQ ID NO: 638) | (SEQ ID NO: 645) | LT | (SEQ ID NO: 666) | (SEQ ID NO: 684) | YFDY |
| | | (SEQ ID | | | (SEQ ID |
| | | NO: 650) | | | NO: 761) |

[0272] In some embodiments, the non-target antigen comprises HLA-A. In some embodiments, the ligand binding domain of the second, inhibitory receptor comprises an HLA-A*01, HLA-A*02, HLA-A*03 or HLA-A*11 ligand binding domain comprising CDR sequences as set forth in Table 6 or Table 7.

[0273] In some embodiments, the non-target antigen comprises HLA-B. In some embodiments, the ligand binding domain of the second, inhibitory receptors comprises an HLA-B*07 ligand binding domain comprising CDR sequences as set forth in Table 6.

[0274] In some embodiments, the non-target antigen comprises HLA-C. In some embodiments, the ligand binding domain of the second, inhibitory receptors comprises an HLA-C*07 ligand binding domain comprising CDR sequences as set forth in Table 6.

[0275] In some embodiments, the extracellular ligand binding domain of the second receptor specifically binds an allelic variant of an HLA-A, HLA-B, or HLA-C protein. In some embodiments, the extracellular ligand binding domain of the second receptor specifically binds to HLA-A*01, HLA-A*02, HLA-A*03, HLA-A*11, HLA-B*07, or HLA-C*07.

[0276] In some embodiments, the extracellular ligand binding domain of the second receptor specifically binds to HLA-A*01. In some embodiments, the extracellular ligand binding domain of the second receptor comprises HLA-A*01 complementarity determining regions (CDRs) CDR-L1, CDR-L2, CDR-L3, CDR-H1, CDR-H2, CDR-H3 as disclosed Table 6; or CDR sequences having at most 1, 2, or 3 substitutions, deletions, or insertions relative to the HLA-A*01 CDRs of Table 6.

[0277] In some embodiments, the extracellular ligand binding domain of the second receptor specifically binds to HLA-A*02. In some embodiments, the extracellular ligand binding domain of the second receptor comprises HLA-A*02 complementarity determining regions (CDRs) CDR-L1, CDR-L2, CDR-L3, CDR-H1, CDR-H2, CDR-H3 as disclosed Table 6; or CDR sequences having at most 1, 2, or 3 substitutions, deletions, or insertions relative to the HLA-A*02 CDRs of Table 6.

[0278] In some embodiments, the extracellular ligand binding domain of the second receptor comprises complementarity determining regions (CDRs) CDR-L1, CDR-L2, CDR-L3, CDR-H1, CDR-H2, CDR-H3 of SEQ ID NOS: 103-108 or of SEQ ID NOS: 109-114; or CDR sequences having at most 1, 2, or 3 substitutions, deletions, or insertion relative to the CDRs of SEQ ID NOS: 103-108 or SEQ ID NOS: 109-114.

[0279] In some embodiments, the extracellular ligand binding domain of the second receptor specifically binds to HLA-A*03. In some embodiments, the extracellular ligand binding domain of the second receptor comprises HLA-A*03 complementarity determining regions (CDRs) CDR-L1, CDR-L2, CDR-L3, CDR-H1, CDR-H2, CDR-H3 as disclosed Table 6; or CDR sequences having at most 1, 2, or 3 substitutions, deletions, or insertions relative to the HLA-A*03 CDRs of Table 6.

[0280] In some embodiments, the extracellular ligand binding domain of the second receptor specifically binds to HLA-A*11. In some embodiments, the extracellular ligand binding domain of the second receptor comprises HLA-A*11 complementarity determining regions (CDRs) CDR-L1, CDR-L2, CDR-L3, CDR-H1, CDR-H2, CDR-H3 as disclosed Table 7; or CDR sequences having at most 1, 2, or 3 substitutions, deletions, or insertions relative to the HLA-A*11 CDRs of Table 7.

[0281] In some embodiments, the extracellular ligand binding domain of the second receptor specifically binds to HLA-B*07. In some embodiments, the extracellular ligand binding domain of the second receptor comprises HLA-B*07 complementarity determining regions (CDRs) CDR-L1, CDR-L2, CDR-L3, CDR-H1, CDR-H2, CDR-H3 as disclosed Table 6; or CDR sequences having at most 1, 2, or 3 substitutions, deletions, or insertions relative to the HLA-B*07 CDRs of Table 6.

[0282] In some embodiments, the extracellular ligand binding domain of the second receptor specifically binds to HLA-C*07. In some embodiments, the extracellular ligand binding domain of the second receptor comprises HLA-C*07 complementarity determining regions (CDRs) CDR-L1, CDR-L2, CDR-L3, CDR-H1, CDR-H2, CDR-H3 as disclosed Table 6; or CDR sequences having at most 1, 2, or 3 substitutions, deletions, or insertions relative to the HLA-C*07 CDRs of Table 6.

[0283] In further embodiments of any of the ligand binding domains, each CDR sequence may have 1, 2, 3 or more substitutions, insertions, or deletions. CDR sequences may tolerate substitutions, deletions, or insertions. Using sequence alignment tools, routine experimentation, and known assays, those of skill in the art may generate and test variant sequences having 1, 2, 3, or more substitutions, insertions, or deletions in CDR sequences without undue experimentation.

[0284] In some embodiments, the non-target antigen comprising HLA-A*02, and the ligand binding domain of the second receptor comprises an HLA-A*02 ligand binding domain. In some embodiments, the ligand binding domain binds HLA-A*02 independent of the peptide in a pMHC complex comprising HLA-A*02. In some embodiments, the HLA-A*02 ligand binding domain comprises an scFv domain. In some embodiments, the HLA-A*02 ligand binding domain comprises a sequence of any one of SEQ ID NOs: 30-41. In some embodiments, the HLA-A*02 ligand binding domain comprises a sequence at least 90%, at least 95%, at least 97% or at least 99% identical to a sequence of any one of SEQ ID NOs: 30-41.

[0285] In some embodiments, the non-target antigen comprises HLA-A*02, and the extracellular ligand binding domain of the second receptor comprises a sequence of SEQ ID NO: 30, or a sequence having at least 90%, at least 95%, at least 97%, or at least 99% identity thereto. In some embodiments, the non-target antigen comprises HLA-A*02, and the extracellular ligand binding domain of the second receptor comprises a sequence of SEQ ID NO: 30.

[0286] In some embodiments, the non-target antigen comprises HLA-A*02, and the extracellular ligand binding domain of the second receptor comprises a VL comprising a sequence of DVLMTQTPLSLPVSLGDQASISCRS SQSIVHSNGNTYLEWYLQKPGQSPKLLIYKVSN RFSGVPDRFSGSGSGTDFTLKISRVEAEDLGVYYCFQGSHVPRTSGGGTKLEIK (SEQ ID NO: 762), or a sequence having at least 90%, at least 95%, at least 97%, or at least 99% identity thereto. In some embodiments, the extracellular ligand binding domain of the second receptor comprises a VH comprising a sequence of QVQLQQSGPELVKPGASVRISCKASGYTFTSYHIHWVKQRPGQGLEWIGWIYPGNV NTEYNEKFKGKATLTADKS S STAYMHLS SLTSED SAVYFCAREEITYAMDYWGQGT SVTVSS (SEQ ID NO: 763), or a sequence having at least 90%, at least 95%, at least 97%, or at least 99% identity thereto. In some embodiments, the VH and VL are separated by a linker, for example GGGGSGGGGSGGGGSGG (SEQ ID NO: 152). In some embodiments, the VH and VL are ordered, from N to C terminal, VH, linker and VL. In some embodiments, the VH and VL are ordered, from N to C terminal, VL, linker and VH.

[0287] In some embodiments, the HLA-A*02 scFv comprises the complementarity determined regions (CDRs) of any one of SEQ ID NOS: 42-53. In some embodiments, the scFv comprises a sequence at least 95% identical to any one of SEQ ID NOS: 42-53. In some embodiments, the scFv comprises a sequence identical to any one of SEQ ID NOS: 42-53. In some embodiments, the heavy chain of the antigen binding domain comprises the heavy chain CDRs of any one of SEQ ID NOS: 42-53, and wherein the light chain of the antigen binding domain comprises the light chain CDRs of any one of SEQ ID NOS: 42-53. In some embodiments, the HLA-A*02 antigen binding domain comprises a heavy chain and a light chain, and the heavy chain comprises CDRs selected from SEQ ID NOs: 45-47 and 51-53 and the light chain comprises CDRs selected from SEQ ID NOs: 42-44 and 48-50.

[0288] In some embodiments, the HLA-A*02 antigen binding domain comprises a heavy chain and a light chain, and the heavy chain comprises a sequence at least 95% identical to the heavy chain portion of any one of SEQ ID NOS: 30-41, and the light chain comprises a sequence at least 95% identical to the light chain portion of any one of SEQ ID NOS: 30-41.

[0289] In some embodiments, the heavy chain comprises a sequence identical to the heavy chain portion of any one of SEQ ID NOS: 30-41, and wherein the light chain of comprises a sequence identical to the light chain portion of any one of SEQ ID NOS: 30-41.

[0290] In some embodiments, the non-target antigen comprises HLA-A*01, and the extracellular ligand binding domain of the second receptor comprises an HLA-A*01 ligand binding domain. In some embodiments, the HLA-A*01 ligand binding domain comprises an scFv domain comprising a sequence selected from the group of sequences set forth in Table 5, or a sequence at least 90%, at least 95% or at least 99% identical to thereto. In some embodiments, the HLA-A*01 scFv comprises HLA-A*1 CDR sequences as set forth in Table 6.

[0291] In some embodiments, the non-target antigen comprises HLA-A*03, and the extracellular ligand binding domain of the second receptor comprises an HLA-A*03 ligand binding domain. In some embodiments, the HLA-A*03 ligand binding domain comprises an scFv domain comprising a sequence selected from the group of sequences set forth in Table 5, or a sequence at least 90%, at least 95% or at least 99% identical to thereto. In some embodiments, the HLA-A*03 scFv comprises HLA-A*03 CDR sequences as set forth in Table 6.

[0292] In some embodiments, the non-target antigen comprises HLA-A*11, and the extracellular ligand binding domain of the second receptor comprises an HLA-A*11 ligand binding domain. In some embodiments, the HLA-A*11 ligand binding domain comprises an scFv domain comprising a sequence selected from the group of sequences set forth in Table 5, or a sequence at least 90%, at least 95% or at least 99% identical to thereto. In some embodiments, the HLA-A*11 scFv comprises HLA-A*11 CDR sequences as set forth in Table 7.

[0293] In some embodiments, the non-target antigen comprises HLA-B*07, and the extracellular ligand binding domain of the second receptor comprises an HLA-B*07 ligand binding domain. In some embodiments, the HLA-B*07 ligand binding domain comprises an scFv domain comprising a sequence selected from the group of sequences set forth in Table 5, or a sequence at least 90%, at least 95% or at least 99% identical to thereto. In some embodiments, the HLA-B*07 scFv comprises HLA-B*07 CDR sequences as set forth in Table 6.

[0294] In some embodiments, the non-target antigen comprises HLA-C*07, and the extracellular ligand binding domain of the second receptor comprises an HLA-C*07 ligand binding domain. In some embodiments, the HLA-C*07 ligand binding domain comprises an scFv domain comprising a sequence selected from the group of sequences set forth in Table 5, or a sequence at least 90%, at least 95% or at least 99% identical to thereto. In some embodiments, the HLA-C*07 scFv comprises HLA-C*07 CDR sequences as set forth in Table 6.

[0295] In some embodiments, the non-target antigen comprises HLA-A*11. Various single variable domains known in the art or disclosed herein that bind to and recognize HLA-A*11 are suitable for use in embodiments. Such scFvs include, for example and without limitation, the following mouse and humanized scFv antibodies that bind HLA-A*11 in a peptide-independent way shown in Table 5 supra.

[0296] Exemplary heavy chain and light chain CDRs (CDR-H1, CDR-H2 and CDR-H3, or CDR-L1, CDR-L2 and CDR-L3, respectively) for HLA-A*11 ligand binding domains are shown in Table 7 below. Any of the VH CDRs in Table 7 and may be combined with the VL CDRs disclosed in Table 7.

TABLE 7
Exemplary anti-HLA-A*11 CDR Sequences

| CDR H1 | CDR H2 | CDR H3 |
|---|---|---|
| SGGYYWS | YIYYSGSTYYNPSLKS | HYYYYYMDV |
| (SEQ ID NO: 92) | (SEQ ID NO: 97) | (SEQ ID NO: 105) |
| TSGVGVG | LIYWNDDKRYSPSLKS | KTTSFYFDY |
| (SEQ ID NO: 93) | (SEQ ID NO: 98) | (SEQ ID NO: 106) |
| SGGYYWS | YIYYSGSTYYNPSLKS | HYYYYMDV |
| (SEQ ID NO: 92) | (SEQ ID NO: 97) | (SEQ ID NO: 104) |
| SYWMH | RINSDGSSTSYADSVK | GVLLYNWFDP |
| (SEQ ID NO: 96) | G | (SEQ ID NO: 110) |
| | (SEQ ID NO: 101) | |
| SGGYYWS | YIYYSGSTYYNPSLKS | HYYYYYLDV |
| (SEQ ID NO: 92) | (SEQ ID NO: 97) | (SEQ ID NO: 103) |
| SYDMH | AIGTAGDTYYPGSVKG | DLPGSYWYFDL |
| (SEQ ID NO: 95) | (SEQ ID NO: 100) | (SEQ ID NO: 109) |
| SYAMH | WINAGNGNTKYSQKFQ | EGNGANPDAFDI |
| (SEQ ID NO: 94) | G | (SEQ ID NO: 108) |
| | (SEQ ID NO: 99) | |
| TSGVGVG | LIYWNDDKRYSPSLKS | RHMRLSCFDY |
| (SEQ ID NO: 93) | (SEQ ID NO: 98) | (SEQ ID NO: 107) |
| SGGYYWS | YIYYSGSTYYNPSLKS | HYYYYSMDV (SEQ |
| (SEQ ID NO: 92) | (SEQ ID NO: 97) | (SEQ ID NO: 102) |
| CDR1 LC | CDR2 LC | CDR3 LC |
| RASQSISSYLN | AASSLQS | QQSYSTPLT |
| (SEQ ID NO: 111) | (SEQ ID NO: 112) | (SEQ ID NO: 113) |

[0297] In some embodiments, the non-target antigen comprising HLA-A*11, and the ligand binding domain of the second receptor comprises an HLA-A*11 ligand binding domain. In some embodiments, the ligand binding domain binds HLA-A*11 independent of the peptide in a pMHC complex comprising HLA-A*11. In some embodiments, the HLA-A*11 ligand binding domain comprises an scFv domain. In some embodiments, the HLA-A*11 ligand binding domain comprises a sequence of any one of SEQ ID NOs: 114-122. In some embodiments, the HLA-A*11 ligand binding domain comprises a sequence at least 90%, at least 95% or at least 99% identical to a sequence of any one of SEQ ID NOs: 114-122.

[0298] In some embodiments, the HLA-A*11 scFv comprises the complementarity determined regions (CDRs) of any one of SEQ ID NOS: 114-122. In some embodiments, the scFv comprises a sequence at least 95% identical to any one of SEQ ID NOS: 114-122. In some embodiments, the scFv comprises a sequence identical to any one of SEQ ID NOS: 114-122. In some embodiments, the heavy chain of the antigen binding domain comprises the heavy chain CDRs of any one of SEQ ID NOS: 132-140, and wherein the light chain of the antigen binding domain comprises the light chain CDRs of SEQ ID NO: 141. In some embodiments, the HLA-A*11 antigen binding domain comprises a heavy chain and a light chain, and the heavy chain comprises one, two, or three CDRs selected from SEQ ID NOs: 92-110 and the light chain comprises one, two or three CDRs selected from SEQ ID NOs: 111-113.

[0299] Exemplary heavy and light chain sequences for HLA-A*11 antigen binding domains are provided in Table 8, below. In some embodiments, the HLA-A*11 antigen binding domain comprises a heavy chain and a light chain, and the heavy chain comprises a sequence at least 95% identical to the heavy chain portion of any one of SEQ ID NOS: 132-140, and the light chain comprises a sequence at least 95% identical to the light chain portion of SEQ ID NO: 141.

[0300] In some embodiments, the heavy chain comprises a sequence identical to the heavy chain portion of any one of SEQ ID NOS: 114-122, and wherein the light chain of comprises a sequence identical to the light chain portion of any one of SEQ ID NOS: 114-122.

TABLE 8
Exemplary anti-HLA-A*11 heavy and light chain sequences

| | | |
|---|---|---|
| scFv | Protein Sequence | DNA Sequence |

Heavy Chain Sequences

| | | |
|---|---|---|
| 9 | QVQLQESGPGLVKPSQTLSLTCT | CAGGTGCAGCTGCAGGAAAGCGGCCCTGGCCTGGTGAAACCCAGCC |
| | VSGGSISSGGYYWSWIRQPPGKG | AGACCCTGAGCCTGACCTGCACAGTGTCCGGCGGCTCGATCAGCAG |
| | LEWIGYIYYSGSTYYNPSLKSRV | CGGCGGCTACTACTGGTCCTGGATCAGACAGCCCCCTGGCAAGGGC |
| | TISVDTSKNQFSLKLSSVTAADT | CTGGAATGGATCGGCTACATCTACTACAGCGGCAGCACCTACTACA |
| | AVYYCARHYYYYSMDVWGKGTTV | ACCCCAGCCTGAAGTCCAGAGTGACCATCAGCGTGGACACCAGCAA |
| | TVSS | GAACCAGTTCAGCCTGAAGCTGAGCAGCGTGACAGCCGCCGACACC |
| | (SEQ ID NO: 132) | GCTGTGTATTACTGTGCGAGACACTACTACTACTACTCCATGGACG |
| | | TCTGGGGCAAAGGGACCACGGTCACCGTGTCCTCA |
| | | (SEQ ID NO: 142) |
| 8 | QITLKESGPTLVKPTQTLTLTCT | CAGATCACCCTGAAAGAGTCCGGCCCCACCCTGGTGAAACCCACCC |
| | FSGFSLSTSGVGVGWIRQPPGKA | AGACCCTGACCCTGACATGCACCTTCAGCGGCTTCAGCCTGAGCAC |
| | LEWLALIYWNDDKRYSPSLKSRL | CTCTGGCGTGGGCGTGGGCTGGATCAGACAGCCTCCCGGCAAGGCC |
| | TITKDTSKNQVVLTMTNMDPVDT | CTGGAATGGCTGGCCCTGATCTACTGGAACGACGACAAGCGGTACA |
| | ATYYCAHRHMRLSCFDYWGQGTL | GCCCCAGCCTGAAGTCCCGGCTGACCATCACCAAGGACACCTCGAA |
| | VTVSS | GAACCAGGTGGTGCTGACCATGACAAACATGGACCCCGTGGACACC |
| | (SEQ ID NO: 133) | GCCACATATTACTGTGCACACAGACACATGCGTTTAAGCTGTTTTG |
| | | ACTACTGGGGCCAGGGAACCCTGGTCACCGTGTCCTCA |
| | | (SEQ ID NO: 143) |
| 7 | QVQLVQSGAEVKKPGASVKVSCK | CAGGTGCAGCTGGTGCAGTCTGGCGCCGAAGTGAAGAAACCTGGCG |
| | ASGYTFTSYAMHWVRQAPGQRLE | CCTCCGTGAAGGTGTCCTGCAAGGCCAGCGGCTACACCTTCACCAG |
| | WMGWINAGNGNTKYSQKFQGRVT | CTACGCCATGCACTGGGTTCGACAGGCCCCTGGCCAGAGACTGGAA |
| | ITRDTSASTAYMELSSLRSEDTA | TGGATGGGCTGGATCAACGCCGGCAACGGCAACACCAAGTACAGCC |
| | VYYCAREGNGANPDAFDIWGQGT | AGAAATTCCAGGGCAGAGTGACCATCACCCGGGACACCAGCGCCAG |
| | MVTVSS | CACCGCCTACATGGAACTGAGCAGCCTGCGGAGCGAGGACACCGCT |
| | (SEQ ID NO: 134) | GTGTATTACTGTGCGAGAGAAGGAAATGGTGCCAACCCTGATGCTT |
| | | TTGATATCTGGGGCCAAGGGACAATGGTCACCGTGTCCTCA |
| | | (SEQ ID NO: 144) |
| 6 | EVQLVESGGGLVQPGGSLRLSCA | GAAGTGCAGCTGGTGGAAAGCGGCGGAGGCCTGGTGCAGCCTGGCG |
| | ASGFTFSSYDMHWVRQATGKGLE | GCAGCCTGAGACTGTCTTGCGCCGCCAGCGGCTTCACCTTCAGCAG |
| | WVSAIGTAGDTYYPGSVKGRFTI | CTACGACATGCACTGGGTCCGCCAGGCCACCGGCAAGGGACTGGAA |
| | SRENAKNSLYLQMNSLRAGDTAV | TGGGTGTCCGCCATCGGCACAGCCGGCGACACTTACTACCCCGGCA |
| | YYCARDLPGSYWYFDLWGRGTLV | GCGTGAAGGGCCGGTTCACCATCAGCAGAGAGAACGCCAAGAACAG |
| | TVSS | CCTGTACCTGCAGATGAACAGCCTTCGAGCCGGCGATACCGCCGTG |
| | (SEQ ID NO: 135) | TATTACTGTGCAAGAGATCTCCCTGGTAGCTACTGGTACTTCGATC |
| | | TCTGGGGCCGTGGCACCCTGGTCACTGTGTCCTCA |
| | | (SEQ ID NO: 145) |
| 5 | QVQLQESGPGLVKPSQTLSLTCT | CAGGTGCAGCTGCAGGAAAGCGGCCCTGGCCTGGTGAAACCCAGCC |
| | VSGGSISSGGYYWSWIRQPPGKG | AGACCCTGAGCCTGACCTGCACAGTGTCCGGCGGCTCGATCAGCAG |
| | LEWIGYIYYSGSTYYNPSLKSRV | CGGCGGCTACTACTGGTCCTGGATCAGACAGCCCCCTGGCAAGGGC |
| | TISVDTSKNQFSLKLSSVTAADT | CTGGAATGGATCGGCTACATCTACTACAGCGGCAGCACCTACTACA |
| | AVYYCARHYYYYYLDVWGKGTTV | ACCCCAGCCTGAAGTCCAGAGTGACCATCAGCGTGGACACCAGCAA |
| | TVSS | GAACCAGTTCAGCCTGAAGCTGAGCAGCGTGACAGCCGCCGACACC |
| | (SEQ ID NO: 136) | GCTGTGTATTACTGTGCGAGACACTACTACTACTACTACCTGGACG |
| | | TCTGGGGCAAAGGGACCACGGTCACCGTGTCCTCA |
| | | (SEQ ID NO: 146) |
| 4 | EVQLVESGGGLVQPGGSLRLSCA | GAAGTGCAGCTGGTGGAAAGCGGCGGAGGCCTGGTGCAGCCTGGCG |
| | ASGFTFSSYWMHWVRQAPGKGLV | GCAGCCTGAGACTGTCTTGCGCCGCCAGCGGCTTCACCTTCAGCAG |
| | WVSRINSDGSSTSYADSVKGRFT | CTACTGGATGCACTGGGTCCGCCAGGCCCCTGGCAAGGGACTGGTC |
| | ISRDNAKNTLYLQMNSLRAEDTA | TGGGTGTCTCGAATCAACAGCGACGGCAGCAGCACCAGCTACGCCG |
| | VYYCCLGVLLYNWFDPWGQGTLV | ACAGCGTGAAGGGCCGGTTCACCATCAGCCGGGACAACGCCAAGAA |
| | TVSS | CACCCTGTACCTGCAGATGAACAGCCTGCGGGCCGAGGACACCGCC |
| | (SEQ ID NO: 137) | GTGTATTACTGTTGTTTGGGTGTTTTATTATACAACTGGTTCGACC |
| | | CCTGGGGCCAGGGAACCCTGGTCACCGTGTCCTCA |
| | | (SEQ ID NO: 147) |
| 3 | QVQLQESGPGLVKPSQTLSLTCT | CAGGTGCAGCTGCAGGAAAGCGGCCCTGGCCTGGTGAAACCCAGCC |
| | VSGGSISSGGYYWSWIRQPPGKG | AGACCCTGAGCCTGACCTGCACAGTGTCCGGCGGCTCGATCAGCAG |
| | LEWIGYIYYSGSTYYNPSLKSRV | CGGCGGCTACTACTGGTCCTGGATCAGACAGCCCCCTGGCAAGGGC |
| | TISVDTSKNQFSLKLSSVTAADT | CTGGAATGGATCGGCTACATCTACTACAGCGGCAGCACCTACTACA |
| | AVYYCARHYYYYMDVWGKGTTVT | ACCCCAGCCTGAAGTCCAGAGTGACCATCAGCGTGGACACCAGCAA |
| | VSS | GAACCAGTTCAGCCTGAAGCTGAGCAGCGTGACAGCCGCCGACACC |
| | (SEQ ID NO: 138) | GCTGTGTATTACTGTGCGAGACACTACTACTACTACATGGACGTCT |
| | | GGGGCAAAGGGACCACGGTCACCGTGTCCTCA |
| | | (SEQ ID NO: 148) |
| 2 | QITLKESGPTLVKPTQTLTLTCT | CAGATCACCCTGAAAGAGTCCGGCCCCACCCTGGTGAAACCCACCC |
| | FSGFSLSTSGVGVGWIRQPPGKA | AGACCCTGACCCTGACATGCACCTTCAGCGGCTTCAGCCTGAGCAC |
| | LEWLALIYWNDDKRYSPSLKSRL | CTCTGGCGTGGGCGTGGGCTGGATCAGACAGCCTCCCGGCAAGGCC |
| | TITKDTSKNQVVLTMTNMDPVDT | CTGGAATGGCTGGCCCTGATCTACTGGAACGACGACAAGCGGTACA |
| | ATYYCAHKTTSFYFDYWGQGTLV | GCCCCAGCCTGAAGTCCCGGCTGACCATCACCAAGGACACCTCGAA |
| | TVSS | GAACCAGGTGGTGCTGACCATGACAAACATGGACCCCGTGGACACC |
| | (SEQ ID NO: 139) | GCCACATATTACTGTGCACACAAAACGACGTCGTTTTACTTTGACT |
| | | ACTGGGGCCAGGGAACCCTGGTCACCGTGTCCTCA |
| | | (SEQ ID NO: 149) |
| 1 | QVQLQESGPGLVKPSQTLSLTCT | CAGGTGCAGCTGCAGGAAAGCGGCCCTGGCCTGGTGAAACCCAGCC |
| | VSGGSISSGGYYWSWIRQPPGKG | AGACCCTGAGCCTGACCTGCACAGTGTCCGGCGGCTCGATCAGCAG |
| | LEWIGYIYYSGSTYYNPSLKSRV | CGGCGGCTACTACTGGTCCTGGATCAGACAGCCCCCTGGCAAGGGC |
| | TISVDTSKNQFSLKLSSVTAADT | CTGGAATGGATCGGCTACATCTACTACAGCGGCAGCACCTACTACA |
| | AVYYCARHYYYYYMDVWGKGTTV | ACCCCAGCCTGAAGTCCAGAGTGACCATCAGCGTGGACACCAGCAA |
| | TVSS | GAACCAGTTCAGCCTGAAGCTGAGCAGCGTGACAGCCGCCGACACC |
| | (SEQ ID NO: 140) | GCTGTGTATTACTGTGCGAGACACTACTACTACTACTACATGGACG |
| | | TCTGGGGCAAAGGGACCACGGTCACCGTGTCCTCA |
| | | (SEQ ID NO: 150) |

Light Chain Sequence

| | | |
|---|---|---|
| 1-9 | DIQMTQSPSSLSASVGDRVTITC | GACATCCAGATGACCCAGTCTCCATCCTCCCTGTCTGCATCTGTAG |
| | RASQSISSYLNWYQQKPGKAPKL | GAGACAGAGTCACCATCACTTGCCGGGCAAGTCAGAGCATTAGCAG |
| | LIYAASSLQSGVPSRFSGSGSGT | CTATTTAAATTGGTATCAGCAGAAACCAGGGAAAGCCCCTAAGCTC |
| | DFTLTISSLQPEDFATYYCQQSY | CTGATCTATGCTGCATCCAGTTTGCAAAGTGGGGTCCCATCAAGGT |
| | STPLTFGGGTKVEIK | TCAGTGGCAGTGGATCTGGGACAGATTTCACTCTCACCATCAGCAG |
| | (SEQ ID NO: 141) | TCTGCAACCTGAAGATTTTGCAACTTACTACTGTCAACAGAGTTAC |
| | | AGTACCCCTCTCACTTTCGGCGGCGGAACAAAGGTGGAGATCAAG |
| | | (SEQ ID NO: 151) |

### Differentially Expressed Inhibitor Ligands

[0301] The disclosure provides inhibitor ligands (non-target antigens) that are differentially expressed between cancer cells and normal cells.

[0302] Activation of the inhibitory receptor is mediated by the presence of the non-target antigen on the surface of a cell. A cell that expresses the non-target antigen will activate the inhibitory receptor based on the level of expression of the non-target antigen. In some embodiments, the non-target antigen is expressed by both target and non-target cells. However, in these embodiments, the non-target antigen is expressed by non-target cells at a higher level than the target cells. The higher levels of non-target antigen expressed by the non-target cells activate the inhibitory receptor, thereby preventing activation of the immune cell. In contrast, the lower levels of non-target antigen expressed by the target are not sufficient to activate the inhibitory receptor, leading to activation of the immune cell.

[0303] In alternative embodiments, the non-target antigen is expressed by non-target cells but not by target cells. In the absence of expression of the non-target antigen, the target cells activate the target receptor, thereby activating the immune cells.

[0304] Differential expression can be determined by any techniques known in the art used to measure expression. These include, inter alia, techniques for measuring mRNA and/or protein levels of a target gene in a cell. Methods of measuring protein levels in samples include immunohistochemistry, enzyme-linked immunosorbent assays (ELISA), and analytical methods such as liquid chromatography-mass spectrometry (LC-MS). Methods of measuring mRNA levels include real time quantitative reverse transcription PCR (qRT-PCR), as well as high throughput sequencing. Expression differences can be observed between, for example, a normal cell and a diseased cell, for example a cancer cell.

[0305] Activation of the inhibitory receptor by a non-target antigen can occur according to various modalities known in the art. Activation of the inhibitory receptor by a non-target antigen can be determined by methods known in the art. For example, the level of downstream intracellular signaling in a cell expressing the inhibitory receptor can be measured through the use of a reporter gene.

[0306] Without wishing to be bound by theory, whether or not expression of a non-target antigen inhibits activation of an immune cell via activation of the inhibitory receptor can occur according to the ratio of the non-target antigen to the inhibitor receptor. The expression levels of the non-target antigen and the inhibitory receptor, and the ratio thereof, can be determined by methods known in the art, including, inter alia, immunohistochemistry and fluorescence activated cell sorting (FACS). Analysis of the expression levels of the non-target antigen on target and non-target cells can be used to predict selective targeting of the immune cells expressing the inhibitory receptor. Low or no expression of the non-target antigen on a target or non-target cell can indicate, for example, that the inhibitory receptor will not be activated in an immune cell of the disclosure.

[0307] Alternatively, or in addition, and without wishing to be bound by theory, inhibition of immune cell activation by a non-target antigen via activation of the inhibitory receptor can depend on the affinity of the non-target antigen for the inhibitory receptor. Methods of measuring affinity are known in the art, and include, inter alia, enzyme-linked immunosorbent assay or radioimmunoassay methods.

[0308] Alternatively, or in addition, and without wishing to be bound by theory, inhibition of immune cell activation by a non-target antigen via activation of the inhibitory receptor can occur according to cross talk between the inhibitory receptor and the activator receptor, leading to down-regulation of the activity of the activator receptor. For example, activation of the inhibitory receptor by the non-target antigen can lead to reduced expression of the activator receptor on the surface of the immune cell.

[0309] In some embodiments, the non-target antigen is expressed at a lower level in a target cell than a normal cell. In some embodiments, the non-target antigen is expressed by healthy cells, i.e. cells that are not cancer cells. In some embodiments, the non-target antigen expression level is at least about 10 times less, at least about 30 times less, at least about 50 times less, at least about 70 times less, at least about 90 times less, at least about 100 times less, at least about 110 times less, at least about 150 times less, at least about 200 times less, at least about 250 times less, at least about 300 times less, at least about 350 times less, at least about 400 times less, at least about 450 times less, at least about 500 times less, at least about 600 times less, at least about 700 times less, at least about 800 times less, at least about 900 times less or at least about 1000 times less in the target cell than in the non-target cell. In some embodiments, the non-target antigen expression level is about 10 times less, about 30 times less, about 50 times less, about 70 times less, about 90 times less, about 100 times less, or about 110 times less than the plurality of healthy cells. In some embodiments, the non-target antigen expression level is at least about 5 times less in the plurality of cancer cells than in the plurality of healthy cells. In some embodiments, the non-target antigen expression level is at least about 5 times less in a target cell than a non-target cell. In some embodiments, the target cells are a plurality of cancer cells that have low or no expression of the non-target antigen.

[0310] Any cell surface molecule expressed by the non-target cells that is not expressed by target cells (or expressed at a low level) may be a suitable non-target antigen for the second receptor extracellular ligand binding domain. For example, a cell adhesion molecule, a cell-cell signaling molecule, an extracellular domain, a molecule involved in chemotaxis, a glycoprotein, a G protein-coupled receptor, a transmembrane protein, a receptor for a neurotransmitter or a voltage gated ion channel can be used as a non-target antigen.

[0311] In some embodiments, the non-target antigen is selected from the group consisting of leucine rich repeat neuronal 4 (LRRN4) and uroplakin B3 (UPKB3), or a peptide antigen of any of these in a complex with a major histocompatibility complex class I (MHC-I). In some embodiments, the non-target antigen is LRRN4 or a peptide antigen thereof in a complex with MHC-I. In some embodiments, the non-target antigen is UPKB3 or a peptide antigen thereof in a complex with MHC-I.

[0312] In some embodiments, the target antigen is a peptide antigen of a cancer cell-specific antigen in a complex with a major histocompatibility complex class I (MHC-I).

[0313] Non-target MHC-I (pMHC) antigens comprising any of HLA-A, HLA-B or HLA-C are envisaged as within the scope of the disclosure. In some embodiments, the non-target antigen comprises HLA-A. In some embodiments, the non-target antigen comprises HLA-B. In some embodiments, the non-target antigen comprises HLA-C.

[0314] Non-target antigens comprise proteins that have low or no expression in cancer cells, for example lung cancer cells, but are expressed in normal tissues, such as normal lung tissue.

[0315] In some embodiments, the non-target antigen comprises LRRN4 or an antigen peptide thereof in a complex with MHC-I. A human LRRN4 is described in NCBI record number NP_689824.2, the contents of which are incorporated by reference herein in their entirety. In some embodiments, LRRN4 comprises an amino acid sequence of:

```
(SEQ ID NO: 75)
    1 MRQTLPLLLL TVLRPSWADP PQEKVPLFRV
        TQQGPWGSSG SNATDSPCEG LPAADATALT
  61 LANRNLERLP GCLPRTLRSL DASHNLLRAL
        STSELGHLEQ LQVLTLRHNR IAALRWGPGG
121 PAGLHTLDLS YNQLAALPPC TGPALSSLRA
        LALAGNPLRA LQPRAFACFP ALQLLNLSCT
181 ALGRGAQGGI AEAAFAGEDG APLVTLEVLD
        LSGTFLERVE SGWIRDLPKL TSLYLRKMPR
241 LTTLEGDIFK MTPNLQQLDC QDSPALASVA
        THIFQDTPHL QVLLFQNCNL SSFPPWTLDS
301 SQVLSINLFG NPLTCSCDLS WLLTDAKRTV
        LSRAADTMCA PAAGSSGPFS ASLSLSQLPG
361 VCQSDQSTTL GASHPPCFNR STYAQGTTVA
        PSAAPATRPA GDQQSVSKAP NVGSRTIAAW
421 PHSDAREGTA PSTTNSVAGH SNSSVFPRAA
        STTRTQHRGE HAPELVLEPD ISAASTPLAS
481 KLLGPFPTSW DRSISSPQPG QRTHATPQAP
        NPSLSEGEIP VLLLDDYSEE EEGRKEEVGT
541 PHQDVPCDYH PCKHLQTPCA ELQRRWRCRC
        PGLSGEDTIP DPPRLQGVTE TTDTSALVHW
601 CAPNSWHGY QIRYSAEGVVA GNQSVVGVIY
        ATARQHPLYG LSPGTTYRVC VLAANRAGLS
661 QPRSSGWRSP CAAFTTKPSF ALLLSGLCAA
        SGLLLASTVV LSACLCRRGQ TLGLQRCDTH
721 LVAYKNPAFD DYPLGLQTVS.
```

[0316] In some embodiments, LRRN4 comprises a sequence that shares at least 80%, at least 85%, at least 90%, at least 95%, at least 96%, at least 97%, at least 98%, or at least 99% identity to SEQ ID NO: 75. In some embodiments, LRRN4 comprises a sequence identical to SEQ ID NO: 75.

[0317] In some embodiments, the non-target antigen comprises UPK3B or an antigen peptide thereof in a complex with MHC-I. All isoforms of UPK3B are envisaged as within the scope of the instant disclosure. A human UPK3B isoform a precursor is described in NCBI record number NP_085047.1, the contents of which are incorporated by reference herein in their entirety. In some embodiments, UPK3B isoform a precursor comprises an amino acid sequence of:

```
(SEQ ID NO: 76)
    1 MGLPWGQPHL GLQMLLLALN CLRPSLSLGE
        WGSWMDASSQ TQGAGGPAGV IGPWAPAPLR
  61 LGEAAPGTPT PVSVAHLLSP VATELVPYTP
        QITAWDLEGK VTATTFSLEQ PRCVEDGLAS
121 ASDTVWLVVA FSNASRGFQN PETLADIPAS
        PQLLTDGHYM TLPLSPDQLP CGDPMAGSGG
181 APVLRVGHDH GCHQQPFCNA PLPGPGPYRE
        DPRIHRHLAR AAKWQHDRHY LHPLFSGRPP
241 TLGLLGSLYH ALLQPVVAGG GPGAAADRLL
        HGQALHDPPH PTQRGRHTAG GLQAWPGPPP
301 QPQPLAWPLC MGLGEMGRRE.
```

[0318] A human UPK3B isoform b precursor is described in NCBI record number NP_872625.1, the contents of which are incorporated by reference herein in their entirety. In some embodiments, UPK3B isoform b precursor comprises an amino acid sequence of:

```
(SEQ ID NO: 77)
    1 MGLPWGQPHL GLQMLLLALN CLRPSLSLEL
        VPYTPQITAW DLEGKVTATT FSLEQPRCVF
  61 DGLASASDTV WLWAFSNAS RGFQNPETLA
        DIPASPQLLT DGHYMTLPLS PDQLPCGDPM
121 AGSGGAPVLR VGHDHGCHQQ PFCNAPLPGP
        GPYRVKFLLM DTRGSPRAET KWSDPITLHQ
181 GKTPGSIDTW PGRRSGSMIV ITSILSSLAG
        LLLLAFLAAS TMRFSSLWWP EEAPEQLRIG
241 SEMGKRYMTH HIPPSEAATL PVGCKPGLDP.
        LPSLSP
```

[0319] A human UPK3B isoform c precursor is described in NCBI record number NP_872624.1, the contents of which are incorporated by reference herein in their entirety. In some embodiments, UPK3B isoform c precursor comprises an amino acid sequence of:

```
(SEQ ID NO: 78)
    1 MGLPWGQPHL GLQMLLLALN CLRPSLSLEL
        VPYTPQITAW DLEGKVTATT FSLEQPRCVF
  61 DGLASASDTV WLWAFSNAS RGFQNPETLA
        DIPASPQLLT DGHYMTLPLS PDQLPCGDPM
121 AGSGGAPVLR VGHDHGCHQQ PFCNAPLPGP
        GPYREDPRIH RHLARAAKWQ HDRHYLHPLF
181 SGRPPTLGLL GSLYHALLQP VVAGGGPGAA
        ADRLLHGQAL HDPPHPTQRG RHTAGGLQAW
241 PGPPPQPQPL AWPLCMGLGE MGRRE.
```

[0320] A human UPK3B isoform d precursor is described in NCBI record number NP_001334613.1, the contents of which are incorporated by reference herein in their entirety. In some embodiments, UPK3B isoform c precursor comprises an amino acid sequence of:

```
(SEQ ID NO: 79)
    1 MGLPWGQPHL GLQMLLLALN CLRPSLSLEL
        VPYTPQITAW DLEGKVTATT FSLEQPRCVF
  61 DGLASASDTV WLVVAFSNAS RGFQNPETLA
        DIPASPQLLT DGHYMTLPLS PDQLPCGDPM
121 AGSGGAPVLR VGHDHGCHQQ PFCNAPLPGP
        GPYRVKFLLM DTRGSPRAET KWSDPITLHQ
181 GKTPGSIDTW PGRRSGSMIV ITSILSSLAG
        LLLLAFLAAS TMRFSSLWWP EEAPEQLRIG
241 SFMGKRYMTH HIPPREAATL PVGCKPGLDP
        LPSLSP.
```

[0321] In some embodiments, UPKB3 comprises a sequence or subsequence that shares at least 80%, at least 85%, at least 90%, at least 95%, at least 96%, at least 97%, at least 98%, or at least 99% identity to any one of SEQ ID NOs: 76-79. In some embodiments, UPKB3 comprises a sequence or subsequence identical to SEQ ID NOs: 76-79.

### Inhibitory Chimeric Antigen Receptors

[0322] The disclosure provides a second receptor that is an inhibitory chimeric antigen receptor. The inhibitory receptor may comprise an extracellular ligand binding domain that binds to and recognizes the non-target antigen or a peptide derivative thereof in a MHC-I complex.

[0323] The term “inhibitory receptor” as used herein refers to a ligand-binding domain that is fused to an intracellular signaling domain capable of transducing an inhibitory signal that inhibits or suppresses the immune activity of an immune cell. Inhibitory receptors have immune cell inhibitory potential, and are distinct and distinguishable from CARs, which are receptors with immune cell activating potential. For example, CARs are activating receptors as they include intracellular stimulatory and/or co-stimulatory domains. Inhibitory receptors are inhibiting receptors that contain intracellular inhibitory domains.

[0324] As used herein “inhibitory signal” refers to signal transduction or changes in protein expression in an immune cell resulting in suppression of an immune response (e.g., decrease in cytokine production or reduction of immune cell activation). Inhibition or suppression of an immune cell can selective and/or reversible, or not selective and/or reversible.

[0325] Inhibitory receptors of the disclosure may comprise an extracellular ligand binding domain. Any type of ligand binding domain that can regulate the activity of a receptor in a ligand dependent manner is envisaged as within the scope of the instant disclosure. Inhibitory receptors are responsive to non-target antigens (e.g. HLA-A*02). For example, when a non-target antigen (e.g. HLA-A*02) binds to or contacts the inhibitory receptor, the inhibitory receptor is responsive and activates an inhibitory signal in the immune cell expressing the inhibitory receptor upon binding of the non-target antigen by the extracellular ligand binding domain of the inhibitory receptor.

[0326] Inhibitory receptors of the disclosure may comprise an extracellular ligand binding domain. Any type of ligand binding domain that can regulate the activity of a receptor in a ligand dependent manner is envisaged as within the scope of the instant disclosure.

[0327] In some embodiments, the ligand binding domain is an antigen binding domain. Exemplary antigen binding domains include, inter alia, scFv, SdAb, Vβ-only domains, and TCR antigen binding domains derived from the TCR a and β chain variable domains.

[0328] Any type of antigen binding domain is envisaged as within the scope of the instant disclosure.

[0329] In some embodiments, the extracellular ligand binding domain of the second receptor is an scFv.

[0330] In some embodiments, the extracellular ligand binding domain of the second receptor binds to and recognizes a polymorphic variant of intercellular adhesion molecule 1 (ICAM1), catechol-O-methyltransferase (COMT), C—X—C motif chemokine ligand 16 (CXCL16), leucine rich repeat neuronal 4 (LRRN4) and uroplakin 3B UPK3B, or an antigen peptide thereof in a complex with a major histocompatibility complex class I (MHC-I), or HLA-A*02. In some embodiments, the extracellular ligand binding domain of the second receptor is an scFv.

[0331] In some embodiments, the extracellular ligand binding domain of the second receptor is fused to the extracellular domain of an inhibitory receptor.

[0332] In some embodiments, the inhibitory receptors of the present disclosure comprise an extracellular hinge region. Exemplary hinges can be isolated or derived from IgD and CD8 domains, for example IgG1. In some embodiments, the hinge is isolated or derived from CD8α or CD28.

[0333] The inhibitory receptors of the present disclosure can be designed to comprise a transmembrane domain that is fused to the extracellular domain of the inhibitory receptor. In some instances, the transmembrane domain can be selected or modified by amino acid substitution to avoid binding of such domains to the transmembrane domains of the same or different surface membrane proteins to minimize interactions with other members of the receptor complex.

[0334] The transmembrane domain may be derived either from a natural or from a synthetic source. Where the source is natural, the domain may be derived from any membrane-bound or transmembrane protein. Transmembrane regions may be isolated or derived from (i.e. comprise at least the transmembrane region(s) of) the alpha, beta or zeta chain of the T-cell receptor, CD28, CD3 epsilon, CD45, CD4, CD5, CD8, CD9, CD16, CD22, CD33, CD37, CD64, CD80, CD86, CD134, CD137, CD154, or from an immunoglobulin such as IgG4. Alternatively the transmembrane domain may be synthetic, in which case it will comprise predominantly hydrophobic residues such as leucine and valine. In some embodiments, a triplet of phenylalanine, tryptophan and valine will be found at each end of a synthetic transmembrane domain. Optionally, a short oligo- or polypeptide linker, preferably between 2 and 10 amino acids in length may form the linkage between the transmembrane domain and the intracellular domain of the inhibitory receptor. A glycine-serine doublet provides a particularly suitable linker.

[0335] The disclosure provides an inhibitory receptor comprising an intracellular domain. The intracellular domain of the inhibitory receptors of the instant disclosure is responsible for inhibiting activation of the immune cells comprising the inhibitory receptor, which would otherwise be activated in response to activation signals by the first receptor. In some embodiments, the inhibitory intracellular domain comprises an immunoreceptor tyrosine-based inhibitory motif (ITIM). In some embodiments, the inhibitory intracellular domain comprising an ITIM can be isolated or derived from an immune checkpoint inhibitor such as CTLA-4 and PD-1. CTLA-4 and PD-1 are immune inhibitory receptors expressed on the surface of T cells, and play a pivotal role in attenuating or terminating T cell responses.

[0336] In some embodiments, an inhibitory intracellular domain is isolated from human tumor necrosis factor related apoptosis inducing ligand (TRAIL) receptor and CD200 receptor 1. In some embodiments, the TRAIL receptor comprises TR10A, TR10B or TR10D.

[0337] In some embodiments, an inhibitory intracellular domain is isolated from phosphoprotein membrane anchor with glycosphingolipid microdomains 1 (PAG1). In some embodiments, an inhibitory intracellular domain is isolated from leukocyte immunoglobulin like receptor B1 (LILRB1).

[0338] In some embodiments, the inhibitory domain is isolated or derived from a human protein, for example a human TRAIL receptor, CTLA-4, PD-1, PAG1 or LILRB1 protein.

[0339] In some embodiments, the inhibitory domain comprises an intracellular domain, a transmembrane or a combination thereof. In some embodiments, the inhibitory domain comprises an intracellular domain, a transmembrane domain, a hinge region or a combination thereof.

[0340] In some embodiments, the inhibitory domain is isolated or derived from killer cell immunoglobulin like receptor, three Ig domains and long cytoplasmic tail 2 (KIR3DL2), killer cell immunoglobulin like receptor, three Ig domains and long cytoplasmic tail 3 (KIR3DL3), leukocyte immunoglobulin like receptor B1 (LIR1, also called LIR-1 and LILRB1), programmed cell death 1 (PD-1), Fc gamma receptor IIB (FcgRIIB), killer cell lectin like receptor K1 (NKG2D), CTLA-4, a domain containing a synthetic consensus ITIM, a ZAP70 SH2 domain (e.g., one or both of the N and C terminal SH2 domains), or ZAP70 KI_K369A (kinase inactive ZAP70).

[0341] In some embodiments, the inhibitory domain is isolated or derived from a human protein.

[0342] In some embodiments, the second, inhibitory receptor comprises an inhibitory domain. In some embodiments, the second, inhibitory receptor comprises an inhibitory intracellular domain and/or an inhibitory transmembrane domain. In some embodiments, the inhibitory intracellular domain is fused to an intracellular domain of an inhibitory receptor. In some embodiments, the inhibitory intracellular domain is fused to the transmembrane domain of an inhibitory receptor.

[0343] In some embodiments, the second, inhibitory receptor comprises a cytoplasmic domain, a transmembrane domain, and an extracellular domain or a portion thereof isolated or derived isolated or derived from the same protein, for example an ITIM containing protein. In some embodiments, the second, inhibitory receptor comprises a hinge region isolated or derived from isolated or derived from the same protein as the intracellular domain and/or transmembrane domain, for example an ITIM containing protein.

[0344] In some embodiments, the second receptor is a TCR comprising an inhibitory domain (an inhibitory TCR). In some embodiments, the inhibitory TCR comprises an inhibitory intracellular domain and/or an inhibitory transmembrane domain. In some embodiments, the inhibitory intracellular domain is fused to the intracellular domain of TCR alpha, TCR beta, CD3 delta, CD3 gamma or CD3 epsilon or a portion thereof a TCR. In some embodiments, the inhibitory intracellular domain is fused to the transmembrane domain of TCR alpha, TCR beta, CD3 delta, CD3 gamma or CD3 epsilon.

[0345] In some embodiments, the second receptor is a TCR comprising an inhibitory domain (an inhibitory TCR). In some embodiments, the inhibitory domain is isolated or derived from LILRB1.

### LILRB1 Inhibitory Receptors

[0346] The disclosure provides a second, inhibitory receptor comprising a LILRB1 inhibitory domain, and optionally, a LILRB1 transmembrane and/or hinge domain, or functional variants thereof. The inclusion of the LILRB1 transmembrane domain and/or the LILRB1 hinge domain in the inhibitory receptor may increase the inhibitory signal generated by the inhibitory receptor compared to a reference inhibitory receptor having another transmembrane domain or another hinge domains. The second, inhibitory receptor comprising the LILRB1 inhibitory domain may be a CAR or TCR, as described herein. Any suitable ligand binding domain, as described herein, may be fused to the LILRB1-based second, inhibitory receptors.

[0347] Leukocyte immunoglobulin-like receptor subfamily B member 1 (LILRB1), also known as Leukocyte immunoglobulin-like receptor B1, as well as ILT2, LIR1, MIR7, PIRB, CD85J, ILT-2 LIR-1, MIR-7 and PIR-B, is a member of the leukocyte immunoglobulin-like receptor (LIR) family. The LILRB1 protein belongs to the subfamily B class of LIR receptors. These receptors contain two to four extracellular immunoglobulin domains, a transmembrane domain, and two to four cytoplasmic immunoreceptor tyrosine-based inhibitory motifs (ITIMs). The LILRB1 receptor is expressed on immune cells, where it binds to MHC class I molecules on antigen-presenting cells and transduces a negative signal that inhibits stimulation of an immune response. LILRB1 is thought to regulate inflammatory responses, as well as cytotoxicity, and to play a role in limiting auto-reactivity. Multiple transcript variants encoding different isoforms of LILRB1 exist, all of which are contemplated as within the scope of the instant disclosure.

[0348] In some embodiments of the inhibitory receptors described herein, the inhibitory receptor comprises one or more domains isolated or derived from LILRB1. In some embodiments of the receptors having one or more domains isolated or derived from LILRB1, the one or more domains of LILRB1 comprise an amino acid sequence that is at least 80%, at least 90%, at least 95%, at least 96%, at least 97%, at least 98%, at least 99% or is identical to a sequence or subsequence of SEQ ID NO: 54. In some embodiments, the one or more domains of LILRB1 comprise an amino acid sequence that is identical to a sequence or subsequence of SEQ ID NO: 54. In some embodiments, the one or more domains of LILRB1 consist of an amino acid sequence that is at least 80%, at least 90%, at least 95%, at least 96%, at least 97%, at least 98%, at least 99% or is identical to a sequence or subsequence of SEQ ID NO: 54. In some embodiments, the one or more domains of LILRB1 consist of an amino acid sequence that is identical to a sequence or subsequence of SEQ ID NO: 54.

[0349] In some embodiments of the receptors having one or more domains isolated or derived from LILRB1, the one or more domains of LILRB1 are encoded by a polynucleotide sequence that is at least 80%, at least 90%, at least 95%, at least 96%, at least 97%, at least 98%, at least 99% or is identical to a sequence or subsequence of SEQ ID NO: 55.

[0350] In some embodiments of the receptors having one or more domains of LILRB1, the one or more domains of LILRB1 are encoded by a polynucleotide sequence that is identical to a sequence or subsequence of SEQ ID NO: 55.

[0351] In various embodiments, an inhibitory receptor is provided, comprising a polypeptide, wherein the polypeptide comprises one or more of: an LILRB1 hinge domain or functional variant thereof; an LILRB1 transmembrane domain or a functional variant thereof; and an LILRB1 intracellular domain or an intracellular domain comprising at least one, or at least two immunoreceptor tyrosine-based inhibitory motifs (ITIMs), wherein each ITIM is independently selected from NLYAAV (SEQ ID NO: 56), VTYAEV (SEQ ID NO: 57), VTYAQL (SEQ ID NO: 58), and SIYATL (SEQ ID NO: 59).

[0352] As used herein an “immunoreceptor tyrosine-based inhibitory motif” or “ITIM” refers to a conserved sequence of amino acids with a consensus sequence of S/I/V/LxYxxI/V/L (SEQ ID NO: 547), or the like, that is found in the cytoplasmic tails of many inhibitory receptors of the immune system. After ITIM-possessing inhibitory receptors interact with their ligand, the ITIM motif is phosphorylated, allowing the inhibitory receptor to recruit other enzymes, such as the phosphotyrosine phosphatases SHP-1 and SHP-2, or the inositol-phosphatase called SHIP.

[0353] In some embodiments, the polypeptide comprises an intracellular domain comprising at least one immunoreceptor tyrosine-based inhibitory motif (ITIM), at least two ITIMs, at least 3 ITIMs, at least 4 ITIMs, at least 5 ITIMs or at least 6 ITIMs. In some embodiments, the intracellular domain has 1, 2, 3, 4, 5, or 6 ITIMs.

[0354] In some embodiments, the polypeptide comprises an intracellular domain comprising at least one ITIM selected from the group of ITIMs consisting of NLYAAV (SEQ ID NO: 56), VTYAEV (SEQ ID NO: 57), VTYAQL (SEQ ID NO: 58), and SIYATL (SEQ ID NO: 59).

[0355] In further particular embodiments, the polypeptide comprises an intracellular domain comprising at least two immunoreceptor tyrosine-based inhibitory motifs (ITIMs), wherein each ITIM is independently selected from NLYAAV (SEQ ID NO: 56), VTYAEV (SEQ ID NO: 57), VTYAQL (SEQ ID NO: 58), and SIYATL (SEQ ID NO: 59).

[0356] In some embodiments, the intracellular domain comprises both ITIMs NLYAAV (SEQ ID NO: 56) and VTYAEV (SEQ ID NO: 57). In some embodiments, the intracellular domain comprises a sequence at least 95% identical to SEQ ID NO: 60. In some embodiments, the intracellular domain comprises or consists essentially of a sequence identical to SEQ ID NO: 60.

[0357] In some embodiments, the intracellular domain comprises both ITIMs VTYAEV (SEQ ID NO: 57) and VTYAQL (SEQ ID NO: 58). In some embodiments, the intracellular domain comprises a sequence at least 95% identical to SEQ ID NO: 61. In some embodiments, the intracellular domain comprises or consists essentially of a sequence identical to SEQ ID NO: 61.

[0358] In some embodiments, the intracellular domain comprises both ITIMs VTYAQL (SEQ ID NO: 58) and SIYATL (SEQ ID NO: 59). In some embodiments, the intracellular domain comprises a sequence at least 95% identical to SEQ ID NO: 62. In some embodiments, the intracellular domain comprises or consists essentially of a sequence identical to SEQ ID NO: 62.

[0359] In some embodiments, the intracellular domain comprises the ITIMs NLYAAV (SEQ ID NO: 56), VTYAEV (SEQ ID NO: 57), and VTYAQL (SEQ ID NO: 58). In some embodiments, the intracellular domain comprises a sequence at least 95% identical to SEQ ID NO: 63. In some embodiments, the intracellular domain comprises or consists essentially of a sequence identical to SEQ ID NO: 63.

[0360] In some embodiments, the intracellular domain comprises the ITIMs VTYAEV (SEQ ID NO: 57), VTYAQL (SEQ ID NO: 58), and SIYATL (SEQ ID NO: 59). In some embodiments, the intracellular domain comprises a sequence at least 95% identical to SEQ ID NO: 64. In some embodiments, the intracellular domain comprises or consists essentially of a sequence identical to SEQ ID NO: 64.

[0361] In some embodiments, the intracellular domain comprises the ITIMs NLYAAV (SEQ ID NO: 56), VTYAEV (SEQ ID NO: 57), VTYAQL (SEQ ID NO: 58), and SIYATL (SEQ ID NO: 59). In some embodiments, the intracellular domain comprises a sequence at least 95% identical to SEQ ID NO: 65. In some embodiments, the intracellular domain comprises or consists essentially of a sequence identical to SEQ ID NO: 65.

[0362] In some embodiments, the intracellular domain comprises a sequence at least 95% identical to the LILRB1 intracellular domain (SEQ ID NO: 70). In some embodiments, the intracellular domain comprises or consists essentially of a sequence identical to the LILRB1 intracellular domain (SEQ ID NO: 70).

[0363] LILRB1 intracellular domains or functional variants thereof of the disclosure can have at least 1, at least 2, at least 4, at least 4, at least 5, at least 6, at least 7, or at least 8 ITIMs. In some embodiments, the LILRB1 intracellular domain or functional variant thereof has 2, 3, 4, 5, or 6 ITIMs.

[0364] In particular embodiments, the intracellular domain comprises two, three, four, five, or six immunoreceptor tyrosine-based inhibitory motifs (ITIMs), wherein each ITIM is independently selected from NLYAAV (SEQ ID NO: 56), VTYAEV (SEQ ID NO: 57), VTYAQL (SEQ ID NO: 58), and SIYATL (SEQ ID NO: 59).

[0365] In particular embodiments, the intracellular domain comprises at least three immunoreceptor tyrosine-based inhibitory motifs (ITIMs), wherein each ITIM is independently selected from NLYAAV (SEQ ID NO: 56), VTYAEV (SEQ ID NO: 57), VTYAQL (SEQ ID NO: 58), and SIYATL (SEQ ID NO: 59).

[0366] In particular embodiments, the intracellular domain comprises three immunoreceptor tyrosine-based inhibitory motifs (ITIMs), wherein each ITIM is independently selected from NLYAAV (SEQ ID NO: 56), VTYAEV (SEQ ID NO: 57), VTYAQL (SEQ ID NO: 58), and SIYATL (SEQ ID NO: 59).

[0367] In particular embodiments, the intracellular domain comprises four immunoreceptor tyrosine-based inhibitory motifs (ITIMs), wherein each ITIM is independently selected from NLYAAV (SEQ ID NO: 56), VTYAEV (SEQ ID NO: 57), VTYAQL (SEQ ID NO: 58), and SIYATL (SEQ ID NO: 59).

[0368] In particular embodiments, the intracellular domain comprises five immunoreceptor tyrosine-based inhibitory motifs (ITIMs), wherein each ITIM is independently selected from NLYAAV (SEQ ID NO: 56), VTYAEV (SEQ ID NO: 57), VTYAQL (SEQ ID NO: 58), and SIYATL (SEQ ID NO: 59).

[0369] In particular embodiments, the intracellular domain comprises six immunoreceptor tyrosine-based inhibitory motifs (ITIMs), wherein each ITIM is independently selected from NLYAAV (SEQ ID NO: 56), VTYAEV (SEQ ID NO: 57), VTYAQL (SEQ ID NO: 58), and SIYATL (SEQ ID NO: 59).

[0370] In particular embodiments, the intracellular domain comprises at least seven immunoreceptor tyrosine-based inhibitory motifs (ITIMs), wherein each ITIM is independently selected from NLYAAV (SEQ ID NO: 56), VTYAEV (SEQ ID NO: 57), VTYAQL (SEQ ID NO: 58), and SIYATL (SEQ ID NO: 59).

[0371] The LILRB1 protein has four immunoglobulin (Ig) like domains termed D1, D2, D3 and D4. In some embodiments, the LILRB1 hinge domain comprises an LILRB1 D3D4 domain or a functional variant thereof. In some embodiments, the LILRB1 D3D4 domain comprises a sequence at least 95%, at least 96%, at least 97%, at least 98%, at least 99% or identical to SEQ ID NO: 66. In some embodiments, the LILRB1 D3D4 domain comprises or consists essentially of SEQ ID NO: 66.

[0372] In some embodiments, the polypeptide comprises the LILRB1 hinge domain or functional variant thereof. In embodiments, the LILRB1 hinge domain or functional variant thereof comprises a sequence at least 95%, at least 96%, at least 97%, at least 98%, at least 99% identical or identical to SEQ ID NO: 73, SEQ ID NO: 66, or SEQ ID NO: 67. In embodiments, the LILRB1 hinge domain or functional variant thereof comprises a sequence at least 95% identical to SEQ ID NO: 73, SEQ ID NO: 66, or SEQ ID NO: 67.

[0373] In some embodiments, the LILRB1 hinge domain comprises a sequence identical to SEQ ID NO: 73, SEQ ID NO: 66, or SEQ ID NO: 67.

[0374] In some embodiments, the LILRB1 hinge domain consists essentially of a sequence identical to SEQ ID NO: 73, SEQ ID NO: 66, or SEQ ID NO: 67.

[0375] In some embodiments, the transmembrane domain is a LILRB1 transmembrane domain or a functional variant thereof. In some embodiments, the LILRB1 transmembrane domain or a functional variant thereof comprises a sequence at least 95% identical, at least 96% identical, at least 97% identical, at least 98% identical or at least 99% to SEQ ID NO: 74. In some embodiments, the LILRB1 transmembrane domain or a functional variant thereof comprises a sequence at least 95% identical to SEQ ID NO: 74. In some embodiments, the LILRB1 transmembrane domain comprises a sequence identical to SEQ ID NO: 74. In embodiments, the LILRB1 transmembrane domain consists essentially of a sequence identical to SEQ ID NO: 74.

[0376] In some embodiments, the transmembrane domain can be attached to the extracellular region of the second, inhibitory receptor, e.g., the antigen binding domain or ligand binding domain, via a hinge, e.g., a hinge from a human protein. For example, in some embodiments, the hinge can be a human immunoglobulin (Ig) hinge, e.g., an IgG4 hinge, a CD8α hinge or an LILRB1 hinge.

[0377] In some embodiments, the second, inhibitory receptor comprises an inhibitory domain. In some embodiments, the second, inhibitory receptor comprises an inhibitory intracellular domain and/or an inhibitory transmembrane domain. In some embodiments, the inhibitory domain is isolated or derived from LILR1B.

### Inhibitory Receptors Comprising Combinations of LILRB1 Domains

[0378] In some embodiments, the LILRB1-based inhibitory receptors of the disclosure comprise more than one LILRB1 domain or functional equivalent thereof. For example, in some embodiments, the inhibitory receptor comprises an LILRB1 transmembrane domain and intracellular domain, or an LILRB1 hinge domain, transmembrane domain and intracellular domain.

[0379] In particular embodiments, the inhibitory receptor comprises an LILRB1 hinge domain or functional variant thereof, and the LILRB1 transmembrane domain or a functional variant thereof. In some embodiments, the polypeptide comprises a sequence at least 95% identical, at least 96% identical, at least 97% identical, at least 98% identical, at least 99% identical or identical to SEQ ID NO: 68. In some embodiments, the polypeptide comprises a sequence at least 95% identical to SEQ ID NO: 68. In some embodiments, the polypeptide comprises a sequence identical to SEQ ID NO: 68.

[0380] In further embodiments, the inhibitory receptor comprises: the LILRB1 transmembrane domain or a functional variant thereof, and an LILRB1 intracellular domain and/or an intracellular domain comprising at least one immunoreceptor tyrosine-based inhibitory motif (ITIM), wherein the ITIM is selected from NLYAAV (SEQ ID NO: 56), VTYAEV (SEQ ID NO: 57), VTYAQL (SEQ ID NO: 58), and SIYATL (SEQ ID NO: 59). In some embodiments, the polypeptide comprises the LILRB1 transmembrane domain or a functional variant thereof, and an LILRB1 intracellular domain and/or an intracellular domain comprising at least two ITIM, wherein each ITIM is independently selected from NLYAAV (SEQ ID NO: 56), VTYAEV (SEQ ID NO: 57), VTYAQL (SEQ ID NO: 58), and SIYATL (SEQ ID NO: 59).

[0381] In some embodiments, the inhibitory receptor comprises a LILRB1 transmembrane domain and intracellular domain. In some embodiments, the polypeptide comprises a sequence at least 95% identical, at least 96% identical, at least 97% identical, at least 98% identical, at least 99% identical or identical to SEQ ID NO: 69. In some embodiments, the polypeptide comprises a sequence at least 95% identical to SEQ ID NO: 69. In some embodiments, the polypeptide comprises a sequence identical to SEQ ID NO: 69.

[0382] In preferred embodiments, the inhibitory receptor comprises: an LILRB1 hinge domain or functional variant thereof; an LILRB1 transmembrane domain or a functional variant thereof; and an LILRB1 intracellular domain and/or an intracellular domain comprising at least two immunoreceptor tyrosine-based inhibitory motifs (ITIMs), wherein each ITIM is independently selected from LYAAV (SEQ ID NO: 56), VTYAE (SEQ ID NO: 57), VTYAQL (SEQ ID NO: 58), and SIYATL (SEQ ID NO: 59).

[0383] In some embodiments, the inhibitory receptor comprises a sequence at least 95% identical to SEQ ID NO: 71 or SEQ ID NO: 72, or at least 99% identical to SEQ ID NO: 71 or SEQ ID NO: 72, or identical to SEQ ID NO: 71 or SEQ ID NO: 72.

[0384] In some embodiments, the polypeptide comprises a sequence at least 99% identical to SEQ ID NO: 68, or at least 99% identical to SEQ ID NO: 68, or identical to SEQ ID NO: 68.

[0385] In some embodiments, the polypeptide comprises a sequence at least 99% identical to SEQ ID NO: 69, or at least 99% identical to SEQ ID NO: 69, or identical to SEQ ID NO: 69.

TABLE 9
Polypeptide sequences for illustrative LILRB1-
based inhibitory receptors

| Name | Sequence |
|---|---|
| LILRB1 | MTPILTVLICLGLSLGPRTHVQAGHLPKPTLWAEPGSVITQ |
| | GSPVTLRCQGGQETQEYRLYREKKTALWITRIPQELVKKG |
| | QFPIPSITWEHAGRYRCYYGSDTAGRSESSDPLELVVTGA |
| | YIKPTLSAQPSPVVNSGGNVILQCDSQVAFDGFSLCKEGED |
| | EHPQCLNSQPHARGSSRAIFSVGPVSPSRRWWYRCYAYDS |
| | NSPYEWSLPSDLLELLVLGVSKKPSLSVQPGPIVAPEETLT |
| | LQCGSDAGYNRFVLYKDGERDFLQLAGAQPQAGLSQANF |
| | TLGPVSRSYGGQYRCYGAHNLSSEWSAPSDPLDILIAGQF |
| | YDRVSLSVQPGPTVASGENVTLLCQSQGWMQTFLLTKEG |
| | AADDPWRLRSTYQSQKYQAEFPMGPVTSAHAGTYRCYGS |
| | QSSKPYLLTHPSDPLELVVSGPSGGPSSPTTGPTSTSGPE |
| | DQPLTPTGSDPQSGLGRHLGVVIGILVAVILLLLLLLLLF |
| | LILRHRRQGKHWTSTQRKADFQHPAGAVGPEPTDRGLQWR |
| | SSPAADAQEENLYAAVKHTQPEDGVEMDTRSPHDEDPQA |
| | VTYAEVKHSRPRREMASPPSPLSGEFLDTKDRQAEEDRQ |
| | MDTEAAASEAPQDVTYAQLHSLTLRREATEPPPSQEGPS |
| | PAVPSIYATLAIHPSQEGPSPAVPSIYATLAIH |
| | SEQ ID NO: 54 |
| LILRB1 hinge- | YGSQSSKPYLLTHPSDPLELVVSGPSGGPSSPTTGPTSTSG |
| transmembrane- | PEDQPLTPTGSDPQSGLGRHLGVVIGILVAVILLLLLLLLL |
| intracellular | FLILRHRRQGKHWTSTQRKADFQHPAGAVGPEPTDRGLQ |
| domain | WRSSPAADAQEENLYAAVKHTQPEDGVEMDTRSPHDEDP |
| | QAVTYAEVKHSRPRREMASPPSPLSGEFLDTKDRQAEEDR |
| | QMDTEAAASEAPQDVTYAQLHSLTLRREATEPPPSQEGPS |
| | PAVPSIYATLAIH |
| | SEQ ID NO: 71 |
| LILRB1 hinge- | VVSGPSGGPSSPTTGPTSTSGPEDQPLTPTGSDPQSGLGRH |
| transmembrane- | LGVVIGILVAVILLLLLLLLLFLILRHRRQGKHWTSTQRK |
| intracellular | ADFQHPAGAVGPEPTDRGLQWRSSPAADAQEENLYAAV |
| domain | KHTQPEDGVEMDTRSPHDEDPQAVTYAEVKHSRPRREMA |
| (w/o | SPPSPLSGEFLDTKDRQAEEDRQMDTEAAASEAPQDVTYA |
| YGSQSSKPYL | QLHSLTLRREATEPPPSQEGPSPAVPSIYATLAIH |
| LTHPSDPLEL | SEQ ID NO: 72 |
| (SEQ ID | |
| NO: 66)) | |
| LILRB1 | YGSQSSKPYLLTHPSDPLELVVSGPSGGPSSPTTGPTS |
| hinge | TSGPEDQPLTPTGSDPQSGLGRHLG |
| domain | SEQ ID NO: 73 |
| LILRB1 | VVIGILVAVILLLLLLLLLFLIL |
| transmembrane | SEQ ID NO: 74 |
| domain | |
| LILRB1 | RHRRQGKHWTSTQRKADFQHPAGAVGPEPTDRGLQWRS |
| intracellular | SPAADAQEENLYAAVKHTQPEDGVEMDTRSPHDEDPQAV |
| domain | TYAEVKHSRPRREMASPPSPLSGEFLDTKDRQAEEDRQM |
| | DTEAAASEAPQDVTYAQLHSLTLRREATEPPPSQEGPSP |
| | AVPSIYATLAIH |
| | SEQ ID NO: 70 |
| ITIM1 | NLYAAV |
| | SEQ ID NO: 56 |
| ITIM2 | VTYAEV |
| | SEQ ID NO: 57 |
| ITIM3 | VTYAQL |
| | SEQ ID NO: 58 |
| ITIM4 | SIYATL |
| | SEQ ID NO: 59 |
| ITIM1-2 | NLYAAVKHTQPEDGVEMDTRSPHDEDPQAVTYAEV |
| | SEQ ID NO: 60 |
| ITIM2-3 | VTYAEVKHSRPRREMASPPSPLSGEFLDTKDRQAEED |
| | RQMDTEAAASEAPQDVTYAQL |
| | SEQ ID NO: 61 |
| ITIM3-4 | VTYAQLHSLTLRREATEPPPSQEGPSPAVPSIYATL |
| | SEQ ID NO: 62 |
| ITIMl-3 | NLYAAVKHTQPEDGVEMDTRSPHDEDPQAVTYAEVKHS |
| | RPRREMASPPSPLSGEFLDTKDRQAEEDRQMDTEAAAS |
| | EAPQDVTYAQL |
| | SEQ ID NO: 63 |
| ITIM2-4 | VTYAEVKHSRPRREMASPPSPLSGEFLDTKDRQAEEDRQ |
| | MDTEAAASEAPQDVTYAQLHSLTLRREATEPPPSQEGPS |
| | PAVPSIYATL |
| | SEQ ID NO: 64 |
| ITIM1-4 | NLYAAVKHTQPEDGVEMDTRSPHDEDPQAVTYAEVKHS |
| | RPRREMASPPSPLSGEFLDTKDRQAEEDRQMDTEAAAS |
| | EAPQDVTYAQLHSLTLRREATEPPPSQEGPSPAVP |
| | SIYATL |
| | SEQ ID NO: 65 |
| D3D4 domain | YGSQSSKPYLLTHPSDPLEL |
| | SEQ ID NO: 66 |
| Short hinge | VVSGPSGGPSSPTTGPTSTSGPEDQPLTPTGSDPQSGL |
| | GRHLG |
| | SEQ ID NO: 67 |
| Hinge | YGSQSSKPYLLTHPSDPLELVVSGPSGGPSSPTTGPTS |
| (iTIM hinge) | TSGPEDQPLTPTGSDPQSGLGRHLGV |
| | (SEQ ID NO: 81) |
| Short hinge 2 | VVSGPSGGPSSPTTGPTSTSGPEDQPLTPTGSDPQS |
| | GLGRHLGV (SEQ ID NO: 82) |
| Long hinge 1 | AGSGGSGGSGGSPVPSTPPTPSPSTPPTPSPSGGSGNSS |
| | GSGGSPVPSTPPTPSPSTPPTPSPSASV |
| | (SEQ ID NO: 83) |
| Long hinge 2 | AGSGGSGGSGGSPVPSTPPTNSSSTPPTPSPSPVPSTPP |
| | TNSSSTPPTPSPSPVPSTPPTNSSSTPPTPSPSASV |
| | (SEQ ID NO: 84) |
| 2X short | VVSGPSGGPSSPTTGPTSTSGPEDQPLTPTGSDPQSGL |
| hinge | GRHVVSGPSGGPSSPTTGPTSTSGPEDQPLTPTGSDPQ |
| | SGLGRHLGV |
| | SEQ ID NO: 91 |
| Hinge | TTGPTSTSGPEDQPLTPTGSDPQSGLGRHLGV |
| (truncated) | (SEQ ID NO: 90) |
| Hinge- | YGSQSSKPYLLTHPSDPLELVVSGPSGGPSSPTTGPT |
| transmembrane | STSGPEDQPLTPTGSDPQSGLGRHLGVVIGILVAVIL |
| | LLLLLLLLFLIL |
| | SEQ ID NO: 68 |
| Transmembrane- | VVIGILVAVILLLLLLLLLFLILRHRRQGKHWTSTQRKA |
| intracellular | DFQHPAGAVGPEPTDRGLQWRSSPAADAQEENLYAAVKH |
| domain. | TQPEDGVEMDTRSPHDEDPQAVTYAEVKHSRPRREMASP |
| | PSPLSGEFLDTKDRQAEEDRQMDTEAAASEAPQDVTYAQ |
| | LHSLTLRREATEPPPSQEGPSPAVPSIYATLAIH |
| | SEQ ID NO: 69 |

[0386] Exemplary inhibitory receptors of the disclosure comprise the scFv specific to any of HLA-A, HLA-B or HLA-C non-target antigens, the sequences of which are set forth in Table 5, fused to the N terminus a LILRB1 hinge, transmembrane and intracellular domain. In some embodiments, the LILRB1 hinge comprises a sequence of SEQ ID NO: 73, the LILRB1 transmembrane domain comprises a sequence of SEQ ID NO: 74, and the LILRB1 intracellular domain comprises a sequence of SEQ ID NO: 70. For example, the second, inhibitory receptor comprises an scFv sequence of Table 5 fused to the N terminus of SEQ ID NO: 71.

[0387] As a further example, the non-target antigen comprises HLA-A*02, and the second inhibitory receptor comprises a sequence of: DVLMTQTPLSLPVSLGDQASISCRSSQSIVHSNGNTYLEWYLQKPGQSPKLLIYKVSNRFSGVPDRFSGSGSGTDFTL KISRVEAEDLGVYYCFQGSHVPRTSGGGTKLEIKGGGGSGGGGSGGGGSGGQVQLQQSGPELVKPGASVRISCKA SGYTFTSYHIHWVKQRPGQGLEWIGWIYPGNVNTEYNEKFKGKATLTADKSSSTAYMHLSSLTSEDSAVYFCAREEI TYAMDYWGQGTSVTVSSYGSQSSKPYLLTHPSDPLELVVSGPSGGPSSPTTGPTSTSGPEDQPLTPTGSDPQSGLG RHLGVVIGILVAVILLLLLLLLLFLILRHRRQGKHWTSTQRKADFQHPAGAVGPEPTDRGLQWRSSPAADAQEENLY AAVKHTQPEDGVEMDTRSPHDEDPQAVTYAEVKHSRPRREMASPPSPLSGEFLDTKDRQAEEDRQMDTEAAAS EAPQDVTYAQLHSLTLRREATEPPPSQEGPSPAVPSIYATLAIH (SEQ ID NO: 348), or a sequence having at least 90%, at least 95%, at least 97% or at least 99% identity thereto. In some embodiments, the non-target antigen comprises HLA-A*02 and the second inhibitory receptor comprises a sequence of SEQ ID NO: 348.

### Polynucleotides and Vectors

[0388] The disclosure provides polynucleotides encoding the sequence(s) of the first and second receptors of the disclosure. The disclosure provides immune cells comprising the polynucleotides and vectors described herein.

[0389] In some embodiments, the sequence of the first and/or second receptor is operably linked to a promoter. In some embodiments, the sequence encoding the first receptor is operably linked to a first promoter, and the sequence encoding the second receptor is operably linked to a second promoter.

[0390] The disclosure provides vectors comprising the polynucleotides described herein.

[0391] In some embodiments, the first receptor is encoded by a first vector and the second receptor is encoded by a second vector. In some embodiments, both receptors are encoded by a single vector. In some embodiments, the first and/or second vector comprises an shRNA, for example a B2M shRNA.

[0392] In some embodiments, both receptors are encoded by a single vector. In some embodiments the vector comprises an shRNA, for example a B2M shRNA.

[0393] In some embodiments, the first and second receptors are encoded by a single vector. Methods of encoding multiple polypeptides using a single vector will be known to persons of ordinary skill in the art, and include, inter alia, encoding multiple polypeptides under control of different promoters, or, if a single promoter is used to control transcription of multiple polypeptides, use of sequences encoding internal ribosome entry sites (IRES) and/or self-cleaving peptides. Exemplary self-cleaving peptides include T2A, P2A, E2A and F2A self-cleaving peptides. In some embodiments, the T2A self-cleaving peptide comprises a sequence of EGRGSLLTCGDVEENPGP (SEQ ID NO: 764). In some embodiments, the P2A self-cleaving peptide comprises a sequence of ATNFSLLKQAGDVEENPGP (SEQ ID NO: 765). In some embodiments, the E2A self-cleaving peptide comprises a sequence of QCTNYALLKLAGDVESNPGP (SEQ ID NO: 766). In some embodiments, the F2A self-cleaving peptide comprises a sequence of VKQTLNFDLLKLAGDVESNPGP (SEQ ID NO: 767). In some embodiments, the T2A self-cleaving peptide comprises a sequence of EGRGSLLTCGDVEENPGP (SEQ ID NO: 764). Any of the foregoing can also include an N terminal GSG linker. For example, a T2A self-cleaving peptide can also comprise a sequence of GSGEGRGSLLTCGDVEENPGP (SEQ ID NO: 351), which can be encoded by a sequence of

(SEQ ID NO: 768)
GGATCCGGAGAGGGCAGAGGCAGCCTGCTGACATGTGGCGACGTGGAAGAGAA
CCCTGGCCCC.

[0394] In some embodiments, the vector is an expression vector, i.e. for the expression of the first and/or second receptor in a suitable cell.

[0395] Vectors derived from retroviruses such as the lentivirus are suitable tools to achieve long-term gene transfer since they allow long-term, stable integration of a transgene and its propagation in daughter cells. Lentiviral vectors have the added advantage over vectors derived from onco-retroviruses such as murine leukemia viruses in that they can transduce non-proliferating cells, such as hepatocytes. They also have the added advantage of low immunogenicity.

[0396] The expression of natural or synthetic nucleic acids encoding receptors is typically achieved by operably linking a nucleic acid encoding the receptor or portions thereof to a promoter, and incorporating the construct into an expression vector. The vectors can be suitable for replication and integration eukaryotes. Typical cloning vectors contain transcription and translation terminators, initiation sequences, and promoters useful for regulation of the expression of the desired nucleic acid sequence.

[0397] The polynucleotides encoding the receptors can be cloned into a number of types of vectors. For example, the polynucleotides can be cloned into a vector including, but not limited to a plasmid, a phagemid, a phage derivative, an animal virus, and a cosmid. Vectors of particular interest include expression vectors, replication vectors, probe generation vectors, and sequencing vectors.

[0398] Further, the expression vector may be provided to cells, such as immune cells, in the form of a viral vector. Viral vector technology is well known in the art and is described, for example, in Sambrook et al. (2001, Molecular Cloning: A Laboratory Manual, Cold Spring Harbor Laboratory, New York), and in other virology and molecular biology manuals. Viruses, which are useful as vectors include, but are not limited to, retroviruses, adenoviruses, adeno-associated viruses, herpes viruses, and lentiviruses. In general, a suitable vector contains an origin of replication functional in at least one organism, a promoter sequence, convenient restriction endonuclease sites, and one or more selectable markers, (e.g., WO 01/96584; WO 01/29058; and U.S. Pat. No. 6,326,193).

[0399] A number of viral based systems have been developed for gene transfer into mammalian cells. For example, retroviruses provide a convenient platform for gene delivery systems. A selected gene can be inserted into a vector and packaged in retroviral particles using techniques known in the art. The recombinant virus can then be isolated and delivered to cells of the subject either in vivo or ex vivo. A number of retroviral systems are known in the art. In some embodiments, adenovirus vectors are used. A number of adenovirus vectors are known in the art. In one embodiment, lentivirus vectors are used.

[0400] Additional promoter elements, e.g., enhancers, regulate the frequency of transcriptional initiation. Typically, these are located in the region 30-110 basepairs (bp) upstream of the start site, although a number of promoters have recently been shown to contain functional elements downstream of the start site as well. The spacing between promoter elements frequently is flexible, so that promoter function is preserved when elements are inverted or moved relative to one another. In the thymidine kinase (tk) promoter, the spacing between promoter elements can be increased to 50 bp apart before activity begins to decline. Depending on the promoter, it appears that individual elements can function either cooperatively or independently to activate transcription.

[0401] One example of a suitable promoter is the immediate early cytomegalovirus (CMV) promoter sequence. This promoter sequence is a strong constitutive promoter sequence capable of driving high levels of expression of any polynucleotide sequence operatively linked thereto. Another example of a suitable promoter is Elongation Growth Factor-1α (EF-1α). However, other constitutive promoter sequences may also be used, including, but not limited to the simian virus 40 (SV40) early promoter, mouse mammary tumor virus (MMTV), human immunodeficiency virus (HIV) long terminal repeat (LTR) promoter, MoMuLV promoter, an avian leukemia virus promoter, an Epstein-Barr virus immediate early promoter, a Rous sarcoma virus promoter, a U6 promoter, as well as human gene promoters such as, but not limited to, the actin promoter, the myosin promoter, the hemoglobin promoter, and the creatine kinase promoter. Further, the disclosure should not be limited to the use of constitutive promoters. Inducible promoters are also contemplated as part of the disclosure. The use of an inducible promoter provides a molecular switch capable of turning on expression of the polynucleotide sequence which it is operatively linked when such expression is desired, or turning off the expression when expression is not desired. Examples of inducible promoters include, but are not limited to a metallothionine promoter, a glucocorticoid promoter, a progesterone promoter, and a tetracycline promoter.

[0402] In order to assess the expression of a receptor, the expression vector to be introduced into a cell can also contain either a selectable marker gene or a reporter gene or both to facilitate identification and selection of expressing cells from the population of cells sought to be transfected or infected through viral vectors. In other aspects, the selectable marker may be carried on a separate piece of DNA and used in a co-transfection procedure. Both selectable markers and reporter genes may be flanked with appropriate regulatory sequences to enable expression in the host cells. Useful selectable markers include, for example, antibiotic-resistance genes, such as neo and the like.

[0403] Reporter genes are used for identifying potentially transfected or transduced cells and for evaluating the functionality of regulatory sequences. In general, a reporter gene is a gene that is not present in or expressed by the recipient organism or tissue and that encodes a polypeptide whose expression is manifested by some easily detectable property, e.g., enzymatic activity. Expression of the reporter gene is assayed at a suitable time after the DNA has been introduced into the recipient cells. Suitable reporter genes may include genes encoding luciferase, beta-galactosidase, chloramphenicol acetyl transferase, secreted alkaline phosphatase, or the green fluorescent protein gene (e.g., Ui-Tei et al., 2000 FEBS Letters 479: 79-82). Suitable expression systems are well known and may be prepared using known techniques or obtained commercially. In general, the construct with the minimal 5′ flanking region showing the highest level of expression of reporter gene is identified as the promoter. Such promoter regions may be linked to a reporter gene and used to evaluate agents for the ability to modulate promoter-driven transcription.

[0404] Methods of introducing and expressing genes into a cell are known in the art. In the context of an expression vector, the vector can be readily introduced into a host cell, e.g., mammalian, bacterial, yeast, or insect cell by any method in the art. For example, the expression vector can be transferred into a host cell by physical, chemical, or biological means.

[0405] Physical methods for introducing a polynucleotide into a host cell include calcium phosphate precipitation, lipofection, particle bombardment, microinjection, electroporation, and the like. Methods for producing cells comprising vectors and/or exogenous nucleic acids are well-known in the art. See, for example, Sambrook et al. (2001, Molecular Cloning: A Laboratory Manual, Cold Spring Harbor Laboratory, New York). One method for the introduction of a polynucleotide into a host cell is calcium phosphate transfection.

[0406] Biological methods for introducing a polynucleotide of interest into a host cell include the use of DNA and RNA vectors. Viral vectors, and especially retroviral vectors, have become the most widely used method for inserting genes into mammalian, e.g., human cells. Other viral vectors can be derived from lentivirus, poxviruses, herpes simplex virus I, adenoviruses and adeno-associated viruses, and the like. See, for example, U.S. Pat. Nos. 5,350,674 and 5,585,362.

[0407] Chemical means for introducing a polynucleotide into a host cell include colloidal dispersion systems, such as macromolecule complexes, nanocapsules, microspheres, beads, and lipid-based systems including oil-in-water emulsions, micelles, mixed micelles, and liposomes. An exemplary colloidal system for use as a delivery vehicle in vitro and in vivo is a liposome (e.g., an artificial membrane vesicle).

[0408] Regardless of the method used to introduce exogenous nucleic acids into a host cell or otherwise expose a cell to the inhibitor of the present disclosure, in order to confirm the presence of the recombinant DNA sequence in the host cell, a variety of assays may be performed. Such assays include, for example, “molecular biological” assays well known to those of skill in the art, such as Southern and Northern blotting, RT-PCR and PCR; “biochemical” assays, such as detecting the presence or absence of a particular peptide, e.g., by immunological means (ELISAs and Western blots) or by assays described herein to identify agents falling within the scope of the disclosure.

### Immune Cells

[0409] The disclosure provides immune cells comprising the receptors, vectors and polynucleotides described herein. 04051 In some embodiments, the immune cells comprise: (a) first receptor, comprising a first extracellular ligand binding domain specific to a target antigen selected from: (i) a cancer cell-specific antigen, or a peptide antigen thereof in a complex with a major histocompatibility complex class I (MHC-I); or (ii) MSLN, or a peptide antigen thereof in a complex with a major histocompatibility complex class I (MHC-I); and (b) a second receptor, comprising a second extracellular ligand binding specific to a non-target antigen selected from intercellular adhesion molecule 1 (ICAM1), catechol-O-methyltransferase (COMT), C—X—C motif chemokine ligand 16 (CXCL16), leucine rich repeat neuronal 4 (LRRN4) and uroplakin 3B UPK3B, or an antigen peptide thereof in a complex with a major histocompatibility complex class I (MHC-I), or HLA-A*02. In some embodiments, the first receptor is a CAR or TCR. In some embodiments, the second receptor is an inhibitory receptor, such as an inhibitory chimeric antigen receptor or TCR.

[0410] The disclosure provides immune cells comprising a first receptor comprising a sequence of SEQ ID NO: 303, and second receptor comprising a sequence of SEQ ID NO: 348, or sequences having at least 90%, at least 95%, at least 97% or at least 99% identity thereto. In some embodiments, the immune cells comprise an shRNA encoded by a sequence comprising SEQ ID NO: 349 or 350, or a sequence having at least 80%, at least 90%, or at least 95% identity thereto. In some embodiments, the immune cells comprise first receptor comprising a sequence of SEQ ID NO: 303, a second receptor comprising a sequence of SEQ ID NO: 348, and a sequence encoding an shRNA comprising a sequence of SEQ ID NO: 349 or 350. In some embodiments, the first receptor and second receptor are encoded by a single polynucleotide, and wherein the sequences encoding the first and second receptors are separated by a sequence encoding a self-cleaving polypeptide. In some embodiments, the self-cleaving polypeptide comprises a T2A self-cleaving polypeptide comprising a sequence of GSGEGRGSLLTCGDVEENPGP (SEQ ID NO: 351).

[0411] As used herein, the term “immune cell” refers to a cell involved in the innate or adaptive (acquired) immune systems. Exemplary innate immune cells include phagocytic cells such as neutrophils, monocytes and macrophages, Natural Killer (NK) cells, polymophonuclear leukocytes such as neutrophils eosinophils and basophils and mononuclear cells such as monocytes, macrophages and mast cells. Immune cells with roles in acquired immunity include lymphocytes such as T-cells and B-cells.

[0412] As used herein, a “T-cell” refers to a type of lymphocyte that originates from a bone marrow precursor that develops in the thymus gland. There are several distinct types of T-cells which develop upon migration to the thymus, which include, helper CD4+ T-cells, cytotoxic CD8+ T cells, memory T cells, regulatory CD4+ T-cells and stem memory T-cells. Different types of T-cells can be distinguished by the ordinarily skilled artisan based on their expression of markers. Methods of distinguishing between T-cell types will be readily apparent to the ordinarily skilled artisan.

[0413] In some embodiments, the first receptor and the second receptor together specifically activate the immune cell in the presence of the target cell.

[0414] In some embodiments, the immune cell is CD4+, CD8+, a gamma delta T cell, an invariant T cells, an iNK cell, a NK cell, a macrophages, or combinations thereof. In some embodiments, the immune cell is a gamma delta (γδ) T cell. In some embodiments, the immune cell is an invariant T cell. In some embodiments, the immune cell is an invariant natural killer T cell (iNKT cell). In some embodiments, the immune cell is a T cell. In some embodiments, the immune cell is a B cell. In some embodiments, the immune cell is a Natural Killer (NK) cell. In some embodiments, the immune cell is CD8−. In some embodiments, the immune cell is CD8+. In some embodiments, the immune cell is CD4+. In some embodiments, the immune cell is CD4−. In some embodiments, the immune cell is CD8−/CD4+. In some embodiments, the immune cell is a CD8+CD4−T cell.

[0415] In some embodiments, the immune cell is non-natural. In some embodiments, the immune cell is isolated.

[0416] Methods transforming populations of immune cells, such as T cells, with the vectors of the instant disclosure will be readily apparent to the person of ordinary skill in the art. For example, CD3+ T cells can be isolated from PBMCs using a CD3+ T cell negative isolation kit (Miltenyi), according to manufacturer's instructions. T cells can be cultured at a density of 1×10\hat{ }6 cells/mL in X-Vivo 15 media supplemented with 5% human A/B serum and 1% Pen/strep in the presence of CD3/28 Dynabeads (1:1 cell to bead ratio) and 300 Units/mL of IL-2 (Miltenyi). After 2 days, T cells can be transduced with viral vectors, such as lentiviral vectors using methods known in the art. In some embodiments, the viral vector is transduced at a multiplicity of infection (MOI) of 5. Cells can then be cultured in IL-2 or other cytokines such as combinations of IL-7/15/21 for an additional 5 days prior to enrichment. Methods of isolating and culturing other populations of immune cells, such as B cells, or other populations of T cells, will be readily apparent to the person of ordinary skill in the art. Although this method outlines a potential approach it should be noted that these methodologies are rapidly evolving. For example excellent viral transduction of peripheral blood mononuclear cells can be achieved after 5 days of growth to generate a >99% CD3+ highly transduced cell population.

[0417] Methods of activating and culturing populations of T cells comprising the TCRs, CARs, inhibitory receptors, receptors or vectors encoding same, will be readily apparent to the person of ordinary skill in the art.

[0418] Whether prior to or after genetic modification of T cells to express a TCR, the T cells can be activated and expanded generally using methods as described, for example, in U.S. Pat. Nos. 6,352,694; 6,534,055; 6,905,680; 6,692,964; 5,858,358; 6,887,466; 6,905,681; 7,144,575; 7,067,318; 7,172,869; 7,232,566; 7,175,843; 5,883,223; 6,905,874; 6,797,514; 6,867,041, 10040846; and U.S. Pat. Appl. Pub. No. 2006/0121005.

[0419] In some embodiments, T cells of the instant disclosure are expanded and activated in vitro. Generally, the T cells of the instant disclosure are expanded in vitro by contact with a surface having attached thereto an agent that stimulates a CD3/TCR complex associated signal and a ligand that stimulates a co-stimulatory molecule on the surface of the T cells. In particular, T cell populations may be stimulated as described herein, such as by contact with an anti-CD3 antibody. For co-stimulation of an accessory molecule on the surface of the T cells, a ligand that binds the accessory molecule is used. For example, a population of T cells can be contacted with an anti-CD3 antibody and an anti-CD28 antibody, under conditions appropriate for stimulating proliferation of the T cells. To stimulate proliferation of either CD4+ T cells or CD8+ T cells, an anti-CD3 antibody and an anti-CD28 antibody can be used. Examples of an anti-CD28 antibody include 9.3, B-T3, XR-CD28 (Diaclone, Besancon, France) can be used as can other methods commonly known in the art (Berg et al., Transplant Proc. 30(8):3975-3977, 1998; Haanen et al., J. Exp. Med. 190(9):13191328, 1999; Garland et al., J. Immunol Meth. 227(1-2):53-63, 1999).

[0420] In some embodiments, the primary stimulatory signal and the co-stimulatory signal for the T cell may be provided by different protocols. For example, the agents providing each signal may be in solution or coupled to a surface. When coupled to a surface, the agents may be coupled to the same surface (i.e., in “cis” formation) or to separate surfaces (i.e., in “trans” formation). Alternatively, one agent may be coupled to a surface and the other agent in solution. In some embodiments, the agent providing the co-stimulatory signal is bound to a cell surface and the agent providing the primary activation signal is in solution or coupled to a surface. In certain embodiments, both agents can be in solution. In another embodiment, the agents may be in soluble form, and then cross-linked to a surface, such as a cell expressing Fc receptors or an antibody or other binding agent which will bind to the agents. In this regard, see for example, U.S. Patent Application Publication Nos. 20040101519 and 20060034810 for artificial antigen presenting cells (aAPCs) that are contemplated for use in activating and expanding T cells in the present disclosure.

[0421] In some embodiments, the two agents are immobilized on beads, either on the same bead, i.e., “cis,” or to separate beads, i.e., “trans.” By way of example, the agent providing the primary activation signal is an anti-CD3 antibody or an antigen-binding fragment thereof and the agent providing the co-stimulatory signal is an anti-CD28 antibody or antigen-binding fragment thereof; and both agents are co-immobilized to the same bead in equivalent molecular amounts. In one embodiment, a 1:1 ratio of each antibody bound to the beads for CD4+ T cell expansion and T cell growth is used. In some embodiments, the ratio of CD3:CD28 antibody bound to the beads ranges from 100:1 to 1:100 and all integer values there between. In one aspect of the present disclosure, more anti-CD28 antibody is bound to the particles than anti-CD3 antibody, i.e., the ratio of CD3:CD28 is less than one. In certain embodiments of the disclosure, the ratio of anti CD28 antibody to anti CD3 antibody bound to the beads is greater than 2:1.

[0422] Ratios of particles to cells from 1:500 to 500:1 and any integer values in between may be used to stimulate T cells or other target cells. As those of ordinary skill in the art can readily appreciate, the ratio of particles to cells may depend on particle size relative to the target cell. For example, small sized beads could only bind a few cells, while larger beads could bind many. In certain embodiments the ratio of cells to particles ranges from 1:100 to 100:1 and any integer values in-between and in further embodiments the ratio comprises 1:9 to 9:1 and any integer values in between, can also be used to stimulate T cells. In some embodiments, a ratio of 1:1 cells to beads is used. One of skill in the art will appreciate that a variety of other ratios may be suitable for use in the present disclosure. In particular, ratios will vary depending on particle size and on cell size and type.

[0423] In further embodiments of the present disclosure, the cells, such as T cells, are combined with agent-coated beads, the beads and the cells are subsequently separated, and then the cells are cultured. In an alternative embodiment, prior to culture, the agent-coated beads and cells are not separated but are cultured together. In a further embodiment, the beads and cells are first concentrated by application of a force, such as a magnetic force, resulting in increased ligation of cell surface markers, thereby inducing cell stimulation.

[0424] By way of example, cell surface proteins may be ligated by allowing paramagnetic beads to which anti-CD3 and anti-CD28 are attached to contact the T cells. In one embodiment the cells (for example, CD4+ T cells) and beads (for example, DYNABEADS CD3/CD28 T paramagnetic beads at a ratio of 1:1) are combined in a buffer. Again, those of ordinary skill in the art can readily appreciate any cell concentration may be used. In certain embodiments, it may be desirable to significantly decrease the volume in which particles and cells are mixed together (i.e., increase the concentration of cells), to ensure maximum contact of cells and particles. For example, in one embodiment, a concentration of about 2 billion cells/ml is used. In another embodiment, greater than 100 million cells/ml is used. In a further embodiment, a concentration of cells of 10, 15, 20, 25, 30, 35, 40, 45, or 50 million cells/ml is used. In yet another embodiment, a concentration of cells from 75, 80, 85, 90, 95, or 100 million cells/ml is used. In further embodiments, concentrations of 125 or 150 million cells/ml can be used. In some embodiments, cells that are cultured at a density of 1×10⁶ cells/mL are used.

[0425] In some embodiments, the mixture may be cultured for several hours (about 3 hours) to about 14 days or any hourly integer value in between. In another embodiment, the beads and T cells are cultured together for 2-3 days. Conditions appropriate for T cell culture include an appropriate media (e.g., Minimal Essential Media or RPMI Media 1640 or, X-vivo 15, (Lonza)) that may contain factors necessary for proliferation and viability, including serum (e.g., fetal bovine or human serum), interleukin-2 (IL-2), insulin, IFN-γ, IL-4, IL-7, GM-CSF, IL-10, IL-12, IL-15, TGFβ, and TNF-α or any other additives for the growth of cells known to the skilled artisan. Other additives for the growth of cells include, but are not limited to, surfactant, plasmanate, and reducing agents such as N-acetyl-cysteine and 2-mercaptoethanol. Media can include RPMI 1640, AIM-V, DMEM, MEM, α-MEM, F-12, X-Vivo 15, and X-Vivo 20, Optimizer, with added amino acids, sodium pyruvate, and vitamins, either serum-free or supplemented with an appropriate amount of serum (or plasma) or a defined set of hormones, and/or an amount of cytokine(s) sufficient for the growth and expansion of T cells. In some embodiments, the media comprises X-VIVO-15 media supplemented with 5% human A/B serum, 1% penicillin/streptomycin (pen/strep) and 300 Units/ml of IL-2 (Miltenyi).

[0426] The T cells are maintained under conditions necessary to support growth, for example, an appropriate temperature (e.g., 37° C.) and atmosphere (e.g., air plus 5% CO2).

[0427] In some embodiments, the T cells comprising TCRs, CARs and inhibitory receptors of the disclosure are autologous. Prior to expansion and genetic modification, a source of T cells is obtained from a subject. Immune cells such as T cells can be obtained from a number of sources, including peripheral blood mononuclear cells, bone marrow, lymph node tissue, cord blood, thymus tissue, tissue from a site of infection, ascites, pleural effusion, spleen tissue, and tumors. In certain embodiments of the present disclosure, any number of T cell lines available in the art, may be used. In certain embodiments of the present disclosure, T cells can be obtained from a unit of blood collected from a subject using any number of techniques known to the skilled artisan, such as Ficoll™ separation.

[0428] In some embodiments, cells from the circulating blood of an individual are obtained by apheresis. The apheresis product typically contains lymphocytes, including T cells, monocytes, granulocytes, B cells, other nucleated white blood cells, red blood cells, and platelets. In some embodiments, the cells collected by apheresis may be washed to remove the plasma fraction and to place the cells in an appropriate buffer or media for subsequent processing steps. In some embodiments, the cells are washed with phosphate buffered saline (PBS). In alternative embodiments, the wash solution lacks calcium and may lack magnesium or may lack many if not all divalent cations. As those of ordinary skill in the art would readily appreciate a washing step may be accomplished by methods known to those in the art, such as by using a semi-automated “flow-through” centrifuge (for example, the Cobe 2991 cell processor, the Baxter CytoMate, or the Haemonetics Cell Saver 5) according to the manufacturer's instructions. After washing, the cells may be resuspended in a variety of biocompatible buffers, such as, for example, Ca2+-free, Mg2+-free PBS, PlasmaLyte A, or other saline solution with or without buffer. Alternatively, the undesirable components of the apheresis sample may be removed and the cells directly resuspended in culture media.

[0429] In some embodiments, immune cells such as T cells are isolated from peripheral blood lymphocytes by lysing the red blood cells and depleting the monocytes, for example, by centrifugation through a PERCOLL™ gradient or by counterflow centrifugal elutriation. Specific subpopulations of immune cells, such as T cells, B cells, or CD4+ T cells can be further isolated by positive or negative selection techniques. For example, in one embodiment, T cells are isolated by incubation with anti-CD4-conjugated beads, for a time period sufficient for positive selection of the desired T cells.

[0430] Enrichment of an immune cell population, such as a T cell population, by negative selection can be accomplished with a combination of antibodies directed to surface markers unique to the negatively selected cells. One method is cell sorting and/or selection via negative magnetic immune-adherence or flow cytometry that uses a cocktail of monoclonal antibodies directed to cell surface markers present on the cells negatively selected. For example, to enrich for CD4+ cells by negative selection, a monoclonal antibody cocktail typically includes antibodies to CD 14, CD20, CD 11b, CD 16, HLA-DR, and CD8.

[0431] For isolation of a desired population of immune cells by positive or negative selection, the concentration of cells and surface (e.g., particles such as beads) can be varied. In certain embodiments, it may be desirable to significantly decrease the volume in which beads and cells are mixed together (i.e., increase the concentration of cells), to ensure maximum contact of cells and beads.

[0432] In some embodiments, the cells may be incubated on a rotator for varying lengths of time at varying speeds at either 2-10° C. or at room temperature.

[0433] T cells for stimulation, or PBMCs from which immune cells such as T cells are isolated, can also be frozen after a washing step. Wishing not to be bound by theory, the freeze and subsequent thaw step provides a more uniform product by removing granulocytes and to some extent monocytes in the cell population. After the washing step that removes plasma and platelets, the cells may be suspended in a freezing solution. While many freezing solutions and parameters are known in the art and will be useful in this context, one method involves using PBS containing 20% DMSO and 8% human serum albumin, or culture media containing 10% Dextran 40 and 5% Dextrose, 20% Human Serum Albumin and 7.5% DMSO, or 31.25% Plasmalyte-A, 31.25% Dextrose 5%, 0.45% NaCl, 10% Dextran 40 and 5% Dextrose, 20% Human Serum Albumin, and 7.5% DMSO or other suitable cell freezing media containing for example, Hespan and PlasmaLyte A, the cells then are frozen to −80° C. at a rate of 1° per minute and stored in the vapor phase of a liquid nitrogen storage tank. Other methods of controlled freezing may be used as well as uncontrolled freezing immediately at −20° C. or in liquid nitrogen.

[0434] The disclosure provides an immune cell expressing the activator and/or blocker receptors described herein, wherein the immune cell has reduced expression and/or function the major histocompatibility (MHC) class I complex.

[0435] In some embodiments, the immune cell is autologous. For example, the immune cells is isolated or derived from same subject who will receive the cell as part of a therapeutic regimen. It can be advantageous to modify autologous immune cells to have reduced expression and/or function of MHC class I with the blocker receptor is specific to an MHC class I antigen. Without wishing to be bound by theory, modification of autologous immune cells to have reduced expression and/or function of MHC class I reduces binding of the blocker receptor by MHC class I expressed by the immune cells, either in cis or in trans.

[0436] In some embodiments, the immune cell is all allogeneic. Allogeneic immune cells can be derived from a donor other than the subject to which the immune cells will be administered. Allogeneic immune cells have been commonly referred to in cell therapy as “off-the-shelf” or “universal” because of the possibility for allogeneic cells to be prepared and stored for use in subjects of a variety of genotypes.

[0437] Any suitable methods of reducing expression and/or function the MHC class I complex are envisaged as within the scope of the instant disclosure, and include, inter alia, expression of interfering RNAs that knock down one or more RNAs encoding MHC class I components, or modifications of genes encoding MHC class I components.

[0438] The major histocompatibility complex (MHC) is a locus on the vertebrate genome that encodes a set of polypeptides required for the adaptive immune system. Among these are MHC class I polypeptides that include HLA-A, HLA-B, and HLA-C and alleles thereof. MHC class I alleles are highly polymorphic and expressed in all nucleated cells. MHC class I polypeptides encoded by HLA-A, HLA-B, and HLA-C and alleles thereof form heterodimers with (32 microglobulin (B2M) and present in complex with antigens on the surface of cells. As referred to herein, an MHC class I gene or polypeptide may refer to any polypeptide found in the MHC or the corresponding gene encoding said polypeptide. In some embodiments, the immune cells of the disclosure are inactivated by an inhibitor ligand comprising an MHC class I polypeptide, e.g. HLA-A, HLA-B, and HLA-C and alleles thereof. HLA-A alleles can be, for example and without limitation, HLA-A*02, HLA-A*02:01, HLA-A*02:01:01, HLA-A*02:01:01:01, and/or any gene that encodes protein identical or similar to HLA-A*02 protein. Thus, to prevent autocrine signaling/binding as described herein, it is desirable to eliminate or reduce expression of polypeptides encoded by HLA-A, HLA-B, and HLA-C and alleles thereof in the immune cells.

Immune Cells with Reduced MHC Class I Polypeptide Expression

[0439] In some embodiments, the immune cells described herein are modified to inactivate, or reduce or eliminate expression or function of an endogenous gene encoding an allele of an endogenous MHC class I polypeptide. In some embodiments, the gene encoding the MHC class I polypeptide is HLA-A, HLA-B, and/or HLA-C. HLA-A, HLA-B and HLA-C are encoded by the HLA-A, HLA-B and HLA-C loci. Each of HLA-A, HLA-B and HLA-C includes many variant alleles, all of which are envisaged as within the scope of the instant disclosure. In some embodiments, the gene encoding the MHC class I polypeptide is HLA-A. In some embodiments, the gene encoding the MHC class I polypeptide is HLA-A*02. In some embodiments, the gene encoding the MHC class I polypeptide is HLA-A*02:01. In some embodiments, the gene encoding the MHC class I polypeptide is HLA-A*02:01:01. In some embodiments, the gene encoding the MHC class I polypeptide is HLA-A*02:01:01:01.

[0440] In some embodiments, the genetically engineered immune cells described herein are modified to reduce or eliminate expression of the B2M gene product. The beta-2 microglobulin (B2M) gene encodes a protein that associates with the major histocompatibility complex (MHC) class I, i.e. MHC-I complex. The MHC-I complex is required for presentation of antigens on the cell surface. The MHC-I complex is disrupted and non-functional when the B2M is deleted (Wang D et al. Stem Cells Transl Med. 4:1234-1245 (2015)). Furthermore, the B2M gene can be disrupted with high efficiency using gene editing techniques known in the art (Ren et al. Clin. Cancer Res. 23:2255-2266 (2017)). Reducing or eliminating B2M can reduce, or eliminate functional MHC I on the surface of the immune cell.

[0441] The disclosure provides gene editing systems for editing an endogenous target gene in an immune cell. The disclosure provides interfering RNAs specific to sequences of target genes. Gene editing systems such as CRISPR/Cas systems, TALENs and zinc fingers can be used to generate double strand breaks, which, through gene repair mechanisms such as homology directed repair or non-homologous end joining (NHEJ), can be used to introduce mutations. NHEJ after resection of the ends of the break, or improper end joining, can be used to introduce deletions. In some embodiments, the target gene comprises a gene encoding a subunit of the MHC-I complex.

[0442] Target gene sequences include, but are not limited to, promoters, enhancers, introns, exons, intron/exon junctions, transcription products (pre-mRNA, mRNA, and splice variants), and/or 3′ and 5′ untranslated regions (UTRs). Any gene element or combination of gene elements may be targeted for the purpose of genetic editing in the immune cells described herein. Modifications to the target genes can be accomplished using any method known in the art to edit the target gene that results in altered or disrupted expression or function the target gene or gene product.

[0443] In some embodiments, modifying the gene encoding the MHC class I polypeptide comprises deleting all or a portion of the gene. In some embodiments, modifying the gene encoding the MHC class I polypeptide comprises introducing a mutation in the gene. In some embodiments, the mutation comprises a deletion, insertion, substitution, or frameshift mutation. In some embodiments, modifying the gene comprises using a nucleic acid guided endonuclease.

[0444] Gene sequences for the target genes described herein are known in the art. The sequences can be found at public databases, such as NCBI GenBank or the NCBI nucleotide database. Sequences may be found using gene identifiers, for example, the HLA-A gene has NCBI Gene ID: 3105, the HLA-B gene has NCBI Gene ID: 3106, the HLA-C gene has NCBI Gene ID: 3107, and the B2M gene has NCBI Gene ID: 567 and NCBI Reference Sequence: NC_000015.10. Gene sequences may also be found by searching public databases using keywords. For example, HLA-A alleles may be found in the NCBI nucleotide database by searching keywords, “HLA-A*02”, “HLA-A*02:01”, “HLA-A*02:01:01”, or “HLA-A*02:01:01:01.” These sequences can be used for targeting in various gene editing techniques known in the art. Table 10 provides non-limiting illustrative sequences of HLA-A allele and B2M gene sequences targeted for modification as described herein.

TABLE 10
Exemplary Target Gene Sequences

| | |
|---|---|
| B2M mRNA | SEQ ID NO: 769 |
| B2M Gene (GenBank: 567) | SEQ ID NO: 770 |
| HLA-A*02:01:01:01 sequence encoding mRNA | SEQ ID NO: 771 |
| HLA-A*02 (GenBank: LK021978.1) | SEQ ID NO: 772 |

[0445] The person of ordinary skill in the art will appreciate that T can be substituted for U to convert an RNA sequence to a DNA sequence and vice versa, and both are envisaged as target gene sequences of the disclosure.

[0446] In some embodiments, a target gene is edited in the immune cells described herein using a nucleic acid guided endonuclease. Exemplary nucleic acid guided endonucleases include Class II endonucleases, such as CRISPR/Cas9.

[0447] “CRISPR” or “CRISPR gene editing” as used herein refers to a set of clustered regularly interspaced short palindromic repeats, or a system comprising such a set of repeats. “Cas”, as used herein, refers to a CRISPR-associated protein. A “CRISPR/Cas” system refers to a system derived from CRISPR and Cas which can be used to silence, knock out, or mutate a target gene. This system is a type of prokaryotic immune system that confers resistance to foreign genetic elements such as plasmids and phages and provides a form of acquired immunity. The CRISPR/Cas system has been modified for use in gene editing. This is accomplished by introducing into the eukaryotic cell a one or more specifically designed guide nucleic acids (gNAs), typically guide RNAs (gRNAs), and an appropriate Cas endonuclease which forms a ribonucleoprotein complex with the gNA. The gNA guides the gNA-endonuclease protein complex to a target genomic location, and the endonuclease introduces strand breakage at the target genomic location. This strand breakage can be repaired by cellular mechanisms such non-homologous end joining (leading to deletions) or homologous repair (which can generate insertions), thereby introducing genetic modifications into the host cell genome.

[0448] CRISPR/Cas systems are classified by class and by type. Class 2 systems currently represent a single interference protein that is categorized into three distinct types (types II, V and VI). Any class 2 CRISPR/Cas system suitable for gene editing, for example a type II, a type V or a type VI system, is envisaged as within the scope of the instant disclosure. Exemplary Class 2 type II CRISPR systems include Cas9, Csn2 and Cas4. Exemplary Class 2, type V CRISPR systems include, Cas12, Cas12a (Cpf1), Cas12b (C2c1), Cas12c (C2c3), Cas12d (CasY), Cas12e (CasX), Cas 12f, Cas12g, Cas12 h, Cas12i and Cas12k (C2c5). Exemplary Class 2 Type VI systems include Cas13, Cas13a (C2c2) Cas13b, Cas13c and Cas13d.

[0449] The CRISPR sequence, sometimes called a CRISPR locus, comprises alternating repeats and spacers. In a naturally-occurring CRISPR, the spacers usually comprise sequences foreign to the bacterium such as a plasmid or phage sequence. As described herein, spacer sequences may also be referred to as “targeting sequences.” In CRISPR/Cas systems for a genetic engineering, the spacers are derived from the target gene sequence (the gNA).

[0450] An exemplary Class 2 type II CRISPR system relies on the protein Cas9, which is a nuclease with two active cutting sites, one for each strand of the double helix. Combining Cas9 and modified CRISPR locus RNA can be used in a system for gene editing. Pennisi (2013) Science 341: 833-836. In some embodiments, the Cas protein used to modify the immune cells is Cas9.

[0451] The CRISPR/Cas system can thus be used to edit a target gene, such as a gene targeted for editing in the immune cells described herein, by adding or deleting a base pair, or introducing a premature stop which thus decreases expression of the target. The CRISPR/Cas system can alternatively be used like RNA interference, turning off a target gene in a reversible fashion. In a mammalian cell, for example, the RNA can guide the Cas protein to a target gene promoter, sterically blocking RNA polymerases.

[0452] A Cas protein may be derived from any bacterial or archaeal Cas protein. Any suitable CRISPR/Cas system is envisaged as within the scope of the instant disclosure. In other aspects, Cas protein comprises one or more of Cas1, Cas1B, Cas2, Cas3, Cas4, Cas5, Cas6, Cas7, Cas8, Cas9, Cas10, Cas12a (Cpf1), Cas13, Csy1, Csy2, Csy3, Cse1, Cse2, Csc1, Csc2, Csa5, Csn2, Csm2, Csm3, Csm4, Csm5, Csm6, Cmr1, Cmr3, Cmr4, Cmr5, Cmr6, Csb1, Csb2, Csb3, Csx17, Csx14, Csx10, Csx16, CsaX, Csx3, Csx1, Csx15, Csf1, Csf2, Csf3, Csf4, CasX, CasY, homologs thereof, or modified versions thereof. In some embodiments, the Cas protein is a Cas9 protein, a Cpf1 protein, a C2c1 protein, a C2c2 protein, a C2c3 protein, Cas3, Cas3-HD, Cas 5, Cas7, Cas8, Cas10, or combinations or complexes of these. In some embodiments, the Cas protein is a Cas9 protein.

[0453] Artificial CRISPR/Cas systems can be generated which inhibit a target gene, using technology known in the art, e.g., that described in U.S. Publication No. 20140068797, and Cong (2013) Science 339: 819-823. Other artificial CRISPR/Cas systems that are known in the art may also be generated which inhibit a target gene, e.g., that described in Tsai (2014) Nature Biotechnol., 32:6 569-576, U.S. Pat. Nos. 8,871,445; 8,865,406; 8,795,965; 8,771,945; and 8,697,359. Methods of designing suitable gNAs for a particular Cas protein will be known by persons of ordinary skill in the art.

[0454] The present disclosure provides gene-targeting guide nucleic acids (gNAs) that can direct the activities of an associated polypeptide (e.g., nucleic acid guided endonuclease) to a specific target gene sequence within a target nucleic acid genome. The genome-targeting nucleic acid can be an RNA. A genome-targeting RNA is referred to as a “guide RNA” or “gRNA” herein. A guide RNA can comprise at least a targeting sequence that hybridizes to a target nucleic acid sequence of interest, and a CRISPR repeat sequence. In some Type II systems, the gRNA also comprises a second RNA called the tracrRNA sequence, also referred to herein as a “scaffold” sequence. In the Type II guide RNA (gRNA), the CRISPR repeat sequence and scaffold sequence hybridize to each other to form a duplex. In the Type V guide RNA (gRNA), the crRNA forms a duplex. In both systems, the duplex can bind a site-directed polypeptide, such that the guide RNA and site-directed polypeptide form a complex. The gene-targeting nucleic acid can provide target specificity to the complex by virtue of its association with the site-directed polypeptide. The gene-targeting nucleic acid thus can direct the activity of the site-directed polypeptide.

[0455] In some embodiments, the disclosure provides a guide RNA comprising a targeting sequence and a guide RNA scaffold sequence, wherein the targeting sequence is complementary to the sequence of a target gene.

[0456] Exemplary guide RNAs include targeting sequences of about 15-20 bases. As is understood by the person of ordinary skill in the art, each gRNA can be designed to include a targeting sequence complementary to its genomic target sequence. For example, each of the targeting sequences, e.g., the RNA version of the DNA sequences presented in Tables 11 and 14, minus the three 3′ nucleotides which represent that PAM site, can be put into a single RNA chimera or a crRNA.

[0457] The gene targeting nucleic acid can be a double-molecule guide RNA. The gene targeting nucleic acid can be a single-molecule guide RNA. The gene targeting nucleic acid can be any known configuration of guide RNA known in the art, such as, for example, including paired gRNA, or multiple gRNAs used in a single step. Although it is clear from genomic sequences where the coding sequences and splice junctions are, other features required for gene expression may be idiosyncratic and unclear.

[0458] A double-molecule guide RNA can comprise two strands of RNA. The first strand comprises a sequence in the 5′ to 3′ direction, an optional spacer extension sequence, a targeting sequence and a minimum CRISPR repeat sequence. The second strand can comprise a minimum tracrRNA sequence (complementary to the minimum CRISPR repeat sequence), a 3′ tracrRNA sequence and an optional tracrRNA extension sequence.

[0459] A single-molecule guide RNA (sgRNA) in a Type II system can comprise, in the 5′ to 3′ direction, an optional spacer extension sequence, a targeting sequence, a minimum CRISPR repeat sequence, a single-molecule guide linker, a minimum tracrRNA sequence, a 3′ tracrRNA sequence and an optional tracrRNA extension sequence. The optional tracrRNA extension can comprise elements that contribute additional functionality (e.g., stability) to the guide RNA. The single-molecule guide linker can link the minimum CRISPR repeat and the minimum tracrRNA sequence to form a hairpin structure. The optional tracrRNA extension can comprise one or more hairpins.

[0460] In some embodiments, guide RNA or single-molecule guide RNA (sgRNA) can comprise a targeting sequence and a scaffold sequence. In some embodiments, the scaffold sequence is a Cas9 gRNA sequence. In some embodiments, the scaffold sequence is encoded by a DNA sequence that comprises a sequence that shares at least 90%, at least 95%, at least 96%, at least 97%, at least 98%, or at least 99% identity to GTTTTAGAGCTAGAAATAGCAAGTTAAAATAAGGCT AGTCCGTTATCAACTTGAAAAAGTGGCACCGAGTCGGTGCTTTTTTT (SEQ ID NO: 773). In some embodiments, the scaffold sequence is encoded by a DNA sequence that comprises GTTTTAGAGCTAGAAATAGCAAGTTAAAATAAGGCTAGTCCGTTATCAACTT GAAAAAGTGGCACCGAGTCGGTGCTTTTTTT (SEQ ID NO: 773).

[0461] In some embodiments, for example those embodiments where the CRISPR/Cas system is a Cas9 system, the sgRNA can comprise a 20 nucleotide targeting sequence at the 5′ end of the sgRNA sequence. The sgRNA can comprise a less than a 20 nucleotide targeting sequence at the 5′ end of the sgRNA sequence. The sgRNA can comprise a more than 20 nucleotide targeting sequence at the 5′ end of the sgRNA sequence. The sgRNA can comprise a variable length targeting sequence with 17-30 nucleotides at the 5′ end of the sgRNA sequence.

[0462] Suitable scaffold sequences, and arrangement of scaffold targeting sequences, will depend on choice of endonuclease, and will be known to persons of skill in the art.

[0463] A single-molecule guide RNA (sgRNA) in a Type II system, e.g. Cas9, can comprise, in the 5′ to 3′ direction, a minimum CRISPR repeat sequence and a targeting sequence.

[0464] By way of illustration, guide RNAs used in the CRISPR/Cas9 or CRISPR/Cpf1 system, or other smaller RNAs can be readily synthesized by chemical means, as illustrated below and described in the art. While chemical synthetic procedures are continually expanding, purifications of such RNAs by procedures such as high performance liquid chromatography (HPLC, which avoids the use of gels such as PAGE) tends to become more challenging as polynucleotide lengths increase significantly beyond a hundred or so nucleotides. One approach used for generating RNAs of greater length is to produce two or more molecules that are ligated together. Much longer RNAs, such as those encoding a Cas9 or Cpf1 endonuclease, are more readily generated enzymatically. Various types of RNA modifications can be introduced during or after chemical synthesis and/or enzymatic generation of RNAs, e.g., modifications that enhance stability, reduce the likelihood or degree of innate immune response, and/or enhance other attributes, as described in the art.

[0465] The targeting sequence of a gRNA hybridizes to a sequence in a target nucleic acid of interest. The targeting sequence of a genome-targeting nucleic acid can interact with a target nucleic acid in a sequence-specific manner via hybridization (i.e., base pairing). The nucleotide sequence of the targeting sequence can vary depending on the sequence of the target nucleic acid of interest.

[0466] In a Cas9 system described herein, the targeting sequence can be designed to hybridize to a target nucleic acid that is located 5′ of the reverse complement of a PAM of the Cas9 enzyme used in the system. The targeting sequence may perfectly match the target sequence or may have mismatches. Each CRISPR/Cas system protein may have a particular PAM sequence, in a particular orientation and position, that it recognizes in a target DNA. For example, S. pyogenes Cas9 recognizes in a target nucleic acid a PAM that comprises the sequence 5′-NRG-3′, where R comprises either A or G, where N is any nucleotide and N is immediately 3′ of the target nucleic acid sequence targeted by the targeting sequence. Selection of appropriate PAM sequences will be apparent to the person of ordinary skill in the art.

[0467] The target sequence is complementary to, and hybridizes with, the targeting sequence of the gRNA. The target nucleic acid sequence can comprise 20 nucleotides. The target nucleic acid can comprise less than 20 nucleotides. The target nucleic acid can comprise more than 20 nucleotides. The target nucleic acid can comprise at least: 5, 10, 15, 16, 17, 18, 19, 20, 21, 22, 23, 24, 25, 30 or more nucleotides. In some embodiments, for example those embodiments where the CRISPR/Cas system is a Cas9 system, the target nucleic acid sequence can comprise 20 nucleotides immediately 5′ of the first nucleotide of the reverse complement of the PAM sequence. This target nucleic acid sequence is often referred to as the PAM strand or a target strand, and the complementary nucleic acid sequence is often referred to the non-PAM strand or non-target strand. One of skill in the art would recognize that the targeting sequence hybridizes to the non-PAM strand of the target nucleic acid, see e.g., US20190185849A1.

[0468] In some examples, the percent complementarity between the targeting sequence and the target nucleic acid is at least about 30%, at least about 40%, at least about 50%, at least about 60%, at least about 65%, at least about 70%, at least about 75%, at least about 80%, at least about 85%, at least about 90%, at least about 95%, at least about 97%, at least about 98%, at least about 99%, or 100%. In some examples, the percent complementarity between the targeting sequence and the target nucleic acid is at most about 30%, at most about 40%, at most about 50%, at most about 60%, at most about 65%, at most about 70%, at most about 75%, at most about 80%, at most about 85%, at most about 90%, at most about 95%, at most about 97%, at most about 98%, at most about 99%, or 100%. In some examples, the percent complementarity between the targeting sequence and the target nucleic acid is 100% over the six contiguous 5′-most nucleotides of the target sequence of the complementary strand of the target nucleic acid. The percent complementarity between the targeting sequence and the target nucleic acid can be at least 60% over about 20 contiguous nucleotides. The length of the targeting sequence and the target nucleic acid can differ by 1 to 6 nucleotides, which may be thought of as a bulge or bulges.

[0469] The targeting sequence can be designed or chosen using computer programs known to persons of ordinary skill in the art. The computer program can use variables, such as predicted melting temperature, secondary structure formation, predicted annealing temperature, sequence identity, genomic context, chromatin accessibility, % GC, frequency of genomic occurrence (e.g., of sequences that are identical or are similar but vary in one or more spots as a result of mismatch, insertion or deletion), methylation status, presence of SNPs, and the like. Available computer programs can take as input NCBI gene IDs, official gene symbols, Ensembl Gene IDs, genomic coordinates, or DNA sequences, and create an output file containing sgRNAs targeting the appropriate genomic regions designated as input. The computer program may also provide a summary of statistics and scores indicating on- and off-target binding of the sgRNA for the target gene (Doench et al. Nat Biotechnol. 34:184-191 (2016)). The disclosure provides guide RNAs comprising a targeting sequence. In some embodiments, the guide RNA further comprises a guide RNA scaffold sequence. In some embodiments, the targeting sequence is complementary to the sequence of a target gene selected from the group consisting of HLA-A, HLA-B, HLA-C, B2M or an allele thereof. In some embodiments, the target gene is an HLA-A gene. In some embodiments, the target gene is an HLA-B gene. In some embodiments, the target gene is an HLA-C gene. In some embodiments the target gene is HLA-A, HLA-B, HLA-C, or a combination thereof. In some embodiments, targeting sequence comprises a sequence that shares about 90%, about 95%, about 96%, about 97%, about 98%, about 99% identity to or is identical to a sequence disclosed in Tables 11 and 14.

[0470] In some embodiments, the gNAs specifically target the sequence of an endogenous HLA-A locus. In some embodiments, the gNAs that specifically target the sequence of an HLA-A locus comprise a sequence that shares about 90%, about 95%, about 96%, about 97%, about 98%, or about 99% identity to a sequence selected from the sequences disclosed in Table 11. In some embodiments, the gNAs that specifically target the sequence of an HLA-A locus comprise a sequence selected from the sequences disclosed in Table 11.

[0471] In some embodiments, the gNAs specifically target a sequence of HLA-A*02 alleles. For example, the gRNAs specifically target, and hybridize to, a sequence shared by all HLA-A*02 alleles, but that is not shared by HLA-A*02 and HLA-A*03 alleles. In some embodiments, the gNAs specifically target a sequence of HLA-A*02:01 alleles. In some embodiments, the gNAs specifically target a sequence of HLA-A*02:01:01 alleles. In some embodiments, the gNAs specifically target a sequence of HLA-A*02:01:01:01 alleles. In some embodiments, the gNAs specifically target a sequence of HLA-A*02:01:01:01 alleles.

[0472] In some embodiments, the gNAs specifically target a coding DNA sequence of HLA-A*02.

[0473] In some embodiments, the gNAs specifically target a coding DNA sequence that is shared by more than 1000 HLA-A*02 alleles. In some embodiments, the gNAs that specifically target a coding DNA sequence in greater than 1000 HLA-A*02 alleles comprise a sequence that shares about 90%, about 95%, about 96%, about 97%, about 98%, about 99% identity or is identical to a sequence selected from the sequences set forth in Table 11.

[0474] The sequences in Tables 11-14 are presented as DNA sequences. The skilled artisan will understand that thymine (T) can be replaced with uracil (U) in any DNA sequence including those set forth in Tables 11-14, to arrive at the corresponding RNA sequence.

TABLE 11
Illustrative sequences targeting
HLA-A and HLA-A alleles

| SEQ | |
|---|---|
| ID | |
| NO | Sequences |
| 774 | TGGACGACACGCAGTTCGTG |
| 775 | CAGATACCTGGAGAACGGGA |
| 776 | TCCCGTTCTCCAGGTATCTG |
| 777 | CCGCCGCGGTCCAAGAGCGC |
| 778 | CCTGCGCTCTTGGACCGCGG |
| 779 | GGACCTGCGCTCTTGGACCGC |
| 780 | AAGGAGACGCTGCAGCGCACGGG |
| 781 | GAAGGAGACGCTGCAGCGCACGG |
| 782 | GCGGGCGCCGTGGATAGAGCAGG |
| 783 | TGCTCTATCCACGGCGCCCGCGG |
| 784 | CGATGAAGCGGGGCTCCCCGCGG |
| 785 | CGTGTCCCGGCCCGGCCGCGGGG |
| 786 | CGGCTCCATCCTCTGGCTCGCGG |
| 787 | GATGTAATCCTTGCCGTCGTAGG |
| 788 | ACAGCGACGCCGCGAGCCAGAGG |
| 789 | GGATGGAGCCGCGGGCGCCGTGG |
| 790 | GGCGCCGTGGATAGAGCAGGAGG |
| 791 | GCGCCGTGGATAGAGCAGGAGGG |
| 792 | CGGCTACTACAACCAGAGCGAGG |
| 793 | CTGGTTGTAGTAGCCGCGCAGGG |
| 794 | TACTACAACCAGAGCGAGGCCGG |
| 795 | CTACCTGGAGGGCACGTGCGTGG |
| 796 | CACGCACGTGCCCTCCAGGTAGG |
| 797 | GCAGGGTCCCCAGGTCCACTCGG |
| 798 | GTGGACCTGGGGACCCTGCGCGG |
| 799 | TGGAGGGCACGTGCGTGGAGTGG |
| 800 | GTATGGCTGCGACGTGGGGTCGG |
| 801 | CTGAGCTGCCATGTCCGCCGCGG |
| 802 | GGATTACATCGCCCTGAAAGAGG |
| 803 | CAAGTGGGAGGCGGCCCATGTGG |
| 804 | GTGGGAGGCGGCCCATGTGGCGG |
| 805 | CAGTTGAGAGCCTACCTGGAGGG |
| 806 | GCAGTTGAGAGCCTACCTGGAGG |
| 807 | TACCACCAGTACGCCTACGACGG |
| 808 | TGCCGTCGTAGGCGTACTGGTGG |
| 809 | CCAGTACGCCTACGACGGCAAGG |
| 810 | GGATGTGAAGAAATACCTCATGG |
| 811 | ATTTCTTCACATCCGTGTCCCGG |
| 812 | AGGCGTACTGGTGGTACCCGCGG |
| 813 | CGTACTGGTGGTACCCGCGGAGG |
| 814 | GAGGATGTATGGCTGCGACGTGG |
| 815 | GGATGTATGGCTGCGACGTGGGG |
| 816 | CTCAGACCACCAAGCACAAGTGG |
| 817 | TCAGACCACCAAGCACAAGTGGG |
| 818 | CACCAAGCACAAGTGGGAGGCGG |
| 819 | GACCACCAAGCACAAGTGGGAGG |
| 820 | GAGCCCCGCTTCATCGCAGTGGG |
| 821 | GTAGCCCACTGCGATGAAGCGGG |
| 822 | TAGCCCACTGCGATGAAGCGGGG |
| 823 | CGTAGCCCACTGCGATGAAGCGG |
| 824 | CTTCATCGCAGTGGGCTACGTGG |
| 825 | GGAGCCCCGCTTCATCGCAGTGG |
| 826 | CGGGGAGACACGGAAAGTGAAGG |
| 827 | AGTATTGGGACGGGGAGACACGG |
| 828 | AGGGTCCGGAGTATTGGGACGGG |
| 829 | GAGGGTCCGGAGTATTGGGACGG |
| 830 | GGACCCTCCTGCTCTATCCACGG |
| 831 | GTGGATAGAGCAGGAGGGTCCGG |
| 832 | AGACTCACCGAGTGGACCTGGGG |
| 833 | CACTCGGTGAGTCTGTGAGTGGG |
| 834 | CAGACTCACCGAGTGGACCTGGG |
| 835 | CCACTCACAGACTCACCGAGTGG |
| 836 | CCACTCGGTGAGTCTGTGAGTGG |
| 837 | TCGGACTGGCGCTTCCTCCGCGG |
| 838 | GCAGCCATACATCCTCTGGACGG |
| 839 | TCTCAACTGCTCCGCCACATGGG |
| 840 | ACCCTCATGCTGCACATGGCAGG |
| 841 | ACCTGCCATGTGCAGCATGAGGG |
| 842 | CACCTGCCATGTGCAGCATGAGG |
| 843 | GGAGGACCAGACCCAGGACACGG |
| 844 | GGATGGGGAGGACCAGACCCAGG |
| 845 | GACCTGGCAGCGGGATGGGGAGG |
| 846 | AGATCACACTGACCTGGCAGCGG |
| 847 | GATCACACTGACCTGGCAGCGGG |
| 848 | AGGTCAGTGTGATCTCCGCAGGG |
| 849 | AAGCCCCTCACCCTGAGATGGGG |
| 850 | CTGCGGAGATCACACTGACCTGG |
| 851 | CAGCAATGATGCCCACGATGGGG |
| 852 | CCAGCAATGATGCCCACGATGGG |
| 853 | GCCAGCAATGATGCCCACGATGG |
| 854 | GGATGGAACCTTCCAGAAGTGGG |
| 855 | GGGATGGAACCTTCCAGAAGTGG |
| 856 | ATGCCCACGATGGGGATGGTGGG |
| 857 | CAGCCCACCATCCCCATCGTGGG |
| 858 | CCAGCCCACCATCCCCATCGTGG |
| 859 | GATGCCCACGATGGGGATGGTGG |
| 860 | CAGGGCCCAGCACCTCAGGGTGG |
| 861 | AATGATGCCCACGATGGGGATGG |
| 862 | GGCCCTGACCCAGACCTGGGCGG |
| 863 | GACCCAGGACACGGAGCTCGTGG |
| 864 | ACACGGAGCTCGTGGAGACCAGG |
| 865 | CGTGGAGACCAGGCCTGCAGGGG |
| 866 | TCGTGGAGACCAGGCCTGCAGGG |
| 867 | AGCTGTGATCACTGGAGCTGTGG |
| 868 | AAAAGGAGGGAGCTACTCTCAGG |
| 869 | ATGTGGAGGAGGAAGAGCTCAGG |
| 870 | GTGTCTCTCACAGCTTGTAAAGG |
| 871 | GAGAGACACATCAGAGCCCTGGG |
| 872 | CTCCGCAGGGTAGAAGCTCAGGG |
| 873 | GGCCCTGAGCTTCTACCCTGCGG |
| 874 | GCTCAGGGCCCAGCACCTCAGGG |
| 875 | TATCTCTGCTCCTGTCCAGAAGG |
| 876 | AGTAGCAGGACGAGGGTTCGGGG |
| 877 | CCCCGAGAGTAGCAGGACGAGGG |
| 878 | CCCTCGTCCTGCTACTCTCGGGG |
| 879 | CCTCGTCCTGCTACTCTCGGGGG |
| 880 | CTGTGGTCGCTGCTGTGATGTGG |
| 881 | TCGCTGCTGTGATGTGGAGGAGG |
| 882 | TGGTCGCTGCTGTGATGTGGAGG |
| 883 | CACAGCCGCCCACTTCTGGAAGG |
| 884 | CCAGAAGTGGGCGGCTGTGGTGG |
| 885 | TGGAACCTTCCAGAAGTGGGCGG |
| 886 | TCACAGCTCCAAAGAGAACCAGG |
| 887 | CTGACCATGAAGCCACCCTGAGG |
| 888 | GCAAACCCTCATGCTGCACATGG |
| 889 | TGAAGCCACCCTGAGGTGCTGGG |
| 890 | GGTGAGTCATATGCGTTTTGGGG |
| 891 | GTGAGTCATATGCGTTTTGGGGG |
| 892 | CTTCATGGTCAGAGACAGCGTGG |
| 893 | TCTGGCCCTGACCCAGACCTGGG |

[0475] The sequences disclosed in Table 11 include the corresponding genomic sequences, inclusive of the PAM sequence. The skilled artisan will understand that the targeting sequence of the gRNA does not include three 3′ terminal nucleotides of the sequences in Table 11, which represent the corresponding PAM site for the gRNA.

[0476] The disclosure provides gNAs comprising a targeting sequence specific to the B2M gene. In some embodiments, the gNAs specifically target the coding sequence (CDS) sequence of the B2M gene. In some embodiments, the gNA comprises a sequence that targets the B2M gene promoter sequence.

[0477] In some embodiments the gNA comprise a targeting sequence and a gNA scaffold sequence. In some embodiments, the targeting sequence comprises a sequence set forth in Table 12, or a sequence shares about 90%, about 95%, about 96%, about 97%, about 98%, about 99% identity thereto.

[0478] In some embodiments, the targeting sequence is complementary to a sequence of the B2M gene. In some embodiments, the B2M gene comprises a sequence that shares about 90%, about 95%, about 96%, about 97%, about 98%, about 99% identity to the B2M sequence set forth in Table 10.

TABLE 12
Illustrative sequences targeting B2M

| SEQ | |
|---|---|
| ID NO | Sequence |
| 894 | CGCGAGCACAGCTAAGGCCA |
| 895 | GAGTAGCGCGAGCACAGCTA |
| 896 | AGGGTAGGAGAGACTCACGC |
| 897 | CTGAATCTTTGGAGTACCTG |
| 898 | TCACGTCATCCAGCAGAGAA |
| 899 | TCCTGAATTGCTATGTGTCT |
| 900 | AAGTCAACTTCAATGTCGGA |
| 901 | GTCTTTTCCCGATATTCCTC |
| 902 | TGGAGTACCTGAGGAATATC |
| 903 | CAGCCCAAGATAGTTAAGTG |
| 904 | ACAAAGTCACATGGTTCACA |
| 905 | ACTCTCTCTTTCTGGCCTGG |
| 906 | TGGGCTGTGACAAAGTCACA |
| 907 | GGCCGAGATGTCTCGCTCCG |
| 908 | CAGTAAGTCAACTTCAATGT |
| 909 | ACTCACGCTGGATAGCCTCC |
| 910 | CATACTCATCTTTTTCAGTG |
| 911 | CACAGCCCAAGATAGTTAAG |
| 912 | TTCAGACTTGTCTTTCAGCA |
| 913 | AGTCACATGGTTCACACGGC |
| 914 | ATACTCATCTTTTTCAGTGG |
| 915 | GGCATACTCATCTTTTTCAG |
| 916 | ACAGCCCAAGATAGTTAAGT |
| 917 | GCTACTCTCTCTTTCTGGCC |
| 918 | TGGAGAGAGAATTGAAAAAG |
| 919 | ACTTGTCTTTCAGCAAGGAC |
| 920 | GAAGTTGACTTACTGAAGAA |
| 921 | GGCCACGGAGCGAGACATCT |
| 922 | GCATACTCATCTTTTTCAGT |
| 923 | CGTGAGTAAACCTGAATCTT |
| 924 | TTACCCCACTTAACTATCTT |
| 925 | TTGGAGTACCTGAGGAATAT |
| 926 | ACCCAGACACATAGCAATTC |
| 927 | TTTGACTTTCCATTCTCTGC |
| 928 | TTCCTGAATTGCTATGTGTC |
| 929 | CTCAGGTACTCCAAAGATTC |
| 930 | CTTACCCCACTTAACTATCT |
| 931 | CTCGCGCTACTCTCTCTTTC |
| 932 | TCGATCTATGAAAAAGACAG |
| 933 | GAGACATGTAAGCAGCATCA |
| 934 | ACATGTAAGCAGCATCATGG |
| 935 | GAAGTCCTAGAATGAGCGCC |
| 936 | GAGCGCCCGGTGTCCCAAGC |
| 937 | AGCGCCCGGTGTCCCAAGCT |
| 938 | GCGCCCGGTGTCCCAAGCTG |
| 939 | CTGGGGCGCGCACCCCAGAT |
| 940 | GGGCGCGCACCCCAGATCGG |
| 941 | GGCGCGCACCCCAGATCGGA |
| 942 | CATCACGAGACTCTAAGAAA |
| 943 | TAAGAAAAGGAAACTGAAAA |
| 944 | AAGAAAAGGAAACTGAAAAC |
| 945 | GAAAGTCCCTCTCTCTAACC |
| 946 | CTAACCTGGCACTGCGTCGC |
| 947 | CTGGCACTGCGTCGCTGGCT |
| 948 | TGCGTCGCTGGCTTGGAGAC |
| 949 | GCTGGCTTGGAGACAGGTGA |
| 950 | GAGACAGGTGACGGTCCCTG |
| 951 | AGACAGGTGACGGTCCCTGC |
| 952 | CCTGCGGGCCTTGTCCTGAT |
| 953 | CGGGCCTTGTCCTGATTGGC |
| 954 | GGGCCTTGTCCTGATTGGCT |
| 955 | GGGCACGCGTTTAATATAAG |
| 956 | CACGCGTTTAATATAAGTGG |
| 957 | TATAAGTGGAGGCGTCGCGC |
| 958 | AAGTGGAGGCGTCGCGCTGG |
| 959 | AGTGGAGGCGTCGCGCTGGC |
| 960 | TTCCTGAAGCTGACAGCATT |
| 961 | TCCTGAAGCTGACAGCATTC |
| 962 | GCCCGAATGCTGTCAGCTTC |
| 963 | AAACGCGTGCCCAGCCAATC |
| 964 | GTGCCCAGCCAATCAGGACA |
| 965 | CCAATCAGGACAAGGCCCGC |
| 966 | CAATCAGGACAAGGCCCGCA |
| 967 | CAAGCCAGCGACGCAGTGCC |
| 968 | CGCAGTGCCAGGTTAGAGAG |
| 969 | GCAGTGCCAGGTTAGAGAGA |
| 970 | GAGTCTCGTGATGTTTAAGA |
| 971 | TAAGAAGGCATGCACTAGAC |
| 972 | AAGAAGGCATGCACTAGACT |
| 973 | TGAGTTTGCTGTCTGTACAT |
| 974 | TACATCGGCGCCCTCCGATC |
| 975 | ACATCGGCGCCCTCCGATCT |
| 976 | CATCGGCGCCCTCCGATCTG |
| 977 | CTGGGGTGCGCGCCCCAGCT |
| 978 | TGGGGTGCGCGCCCCAGCTT |
| 979 | CGCGCCCCAGCTTGGGACAC |
| 980 | GCGCCCCAGCTTGGGACACC |
| 981 | CAAGTCACTTAGCATCTCTG |
| 982 | ACAGAAGTTCTCCTTCTGCT |
| 983 | ATTCAAAGATCTTAATCTTC |
| 984 | TTCAAAGATCTTAATCTTCT |
| 985 | TTTTCTCGAATGAAAAATGC |
| 986 | TGCAGGTCCGAGCAGTTAAC |
| 987 | GGTCCGAGCAGTTAACTGGC |
| 988 | GTCCGAGCAGTTAACTGGCT |
| 989 | TCCGAGCAGTTAACTGGCTG |
| 990 | AGCAAGTCACTTAGCATCTC |
| 991 | GCAAGTCACTTAGCATCTCT |
| 992 | TGGGGCCAGTCTGCAAAGCG |
| 993 | GGGGCCAGTCTGCAAAGCGA |
| 994 | GGGCCAGTCTGCAAAGCGAG |
| 995 | GGCCAGTCTGCAAAGCGAGG |
| 996 | GGACACCGGGCGCTCATTCT |
| 997 | GGCGCTCATTCTAGGACTTC |
| 998 | CTCATTCTAGGACTTCAGGC |
| 999 | ATTCTAGGACTTCAGGCTGG |
| 1000 | TTCAGGCTGGAGGCACATTA |
| 1001 | TGCCCCCTCGCTTTGCAGAC |
| 1002 | GATGCTAAGTGACTTGCTAA |
| 1003 | GCCCCAGCCAGTTAACTGCT |
| 1004 | GCATTTTTCATTCGAGAAAA |
| 1005 | TTTGAATGCTACCTAGCAGA |
| 1006 | TTCTGTTTATAACTACAGCT |
| 1007 | TCTGTTTATAACTACAGCTT |

[0479] In some embodiments, the immune cells described herein are edited using TALEN gene editing.

[0480] “TALEN” or “TALEN gene editing” refers to a transcription activator-like effector nuclease, which is an artificial nuclease used to edit a target gene.

[0481] TALENs are produced artificially by fusing a TAL effector DNA binding domain to a DNA cleavage domain. Transcription activator-like effectors (TALEs) derived from Xanthomonas bacteria can be engineered to bind any desired DNA sequence, including a portion of target genes such as TCR subunits, MHC class I complex components, or CD52. By combining an engineered TALE with a DNA cleavage domain, a restriction enzyme can be produced which is specific to any desired DNA sequence, including a target gene sequence. These can then be introduced into a cell, wherein they can be used for genome editing.

[0482] To produce a TALEN, a TALE protein is fused to a nuclease (N), which is a wild-type or mutated Fold endonuclease. Several mutations to FokI have been made for its use in TALENs; these, for example, improve cleavage specificity or activity.

[0483] The FokI domain functions as a dimer, requiring two constructs with unique DNA binding domains for sites in the target genome with proper orientation and spacing. Both the number of amino acid residues between the TALE DNA binding domain and the FokI cleavage domain and the number of bases between the two individual TALEN binding sites appear to be important parameters for achieving high levels of activity.

[0484] TALENs specific to sequences in a target gene can be constructed using any method known in the art, including various schemes using modular components.

[0485] In some embodiments, a target gene is edited in the immune cells described herein using ZFN gene editing.

[0486] “ZFN” or “Zinc Finger Nuclease” or “ZFN gene editing” refer to a zinc finger nuclease, an artificial nuclease which can be used to edit a target gene.

[0487] Like a TALEN, a ZFN comprises a Fold nuclease domain (or derivative thereof) fused to a DNA-binding domain. In the case of a ZFN, the DNA-binding domain comprises one or more zinc fingers.

[0488] A zinc finger is a small protein structural motif stabilized by one or more zinc ions. A zinc finger can comprise, for example, Cys2His2, and can recognize an approximately 3-bp sequence. Various zinc fingers of known specificity can be combined to produce multi-finger polypeptides which recognize about 6, 9, 12, 15 or 18-bp sequences. Various selection and modular assembly techniques are available to generate zinc fingers (and combinations thereof) recognizing specific sequences, including phage display, yeast one-hybrid systems, bacterial one-hybrid and two-hybrid systems, and mammalian cells.

[0489] Like a TALEN, a ZFN must dimerize to cleave DNA. Thus, a pair of ZFNs are required to target non-palindromic DNA sites. The two individual ZFNs must bind opposite strands of the DNA with their nucleases properly spaced apart.

[0490] Also like a TALEN, a ZFN can create a double-stranded break in the DNA, which can create a frame-shift mutation if improperly repaired, leading to a decrease in the expression and amount of a target gene or gene product in a cell. ZFNs can also be used with homologous recombination to mutate in a target gene.

[0491] ZFNs specific to sequences in a target gene can be constructed using any method known in the art.

[0492] In some embodiments, the expression and of function of one or more MCH-I components are reduced using RNA interference. “RNAi” or “RNA interference” refers to the process of sequence-specific post-transcriptional gene silencing, mediated by double-stranded RNA (dsRNA). Duplex RNAs such as siRNA (small interfering RNA), miRNA (micro RNA), shRNA (short hairpin RNA), ddRNA (DNA-directed RNA), piRNA (Piwi-interacting RNA), or rasiRNA (repeat associated siRNA) and modified forms thereof are all capable of mediating RNA interference. These dsRNA molecules may be commercially available or may be designed and prepared based on known sequence information. The anti-sense strand of these molecules can include RNA, DNA, PNA, or a combination thereof. DNA/RNA chimeric polynucleotides include, but are not limited to, a double-strand polynucleotide composed of DNA and RNA that inhibits the expression of a target gene. dsRNA molecules can also include one or more modified nucleotides, as described herein, which can be incorporated on either or both strands.

[0493] In RNAi gene silencing or knockdown, dsRNA comprising a first (anti-sense) strand that is complementary to a portion of a target gene and a second (sense) strand that is fully or partially complementary to the first anti-sense strand is introduced into an organism. After introduction into the organism, the target gene-specific dsRNA is processed into relatively small fragments (siRNAs) and can subsequently become distributed throughout the organism, decrease messenger RNA of target gene, leading to a phenotype that may come to closely resemble the phenotype arising from a complete or partial deletion of the target gene.

[0494] Certain dsRNAs in cells can undergo the action of Dicer enzyme, a ribonuclease III enzyme. Dicer can process the dsRNA into shorter pieces of dsRNA, i.e. siRNAs. RNAi also involves an endonuclease complex known as the RNA induced silencing complex (RISC). Following cleavage by Dicer, siRNAs enter the RISC complex and direct cleavage of a single stranded RNA target having a sequence complementary to the anti-sense strand of the siRNA duplex. The other strand of the siRNA is the passenger strand. Cleavage of the target RNA takes place in the middle of the region complementary to the anti-sense strand of the siRNA duplex. siRNAs can thus down regulate or knock down gene expression by mediating RNA interference in a sequence-specific manner.

[0495] As used herein with respect to RNA interference, “target gene” or “target sequence” refers to a gene or gene sequence whose corresponding RNA is targeted for degradation through the RNAi pathway using dsRNAs or siRNAs as described herein. Exemplary target gene sequences are shown in Table 10. To target a gene, for example using an siRNA, the siRNA comprises an anti-sense region complementary to, or substantially complementary to, at least a portion of the target gene or sequence, and sense strand complementary to the anti-sense strand. Once introduced into a cell, the siRNA directs the RISC complex to cleave an RNA comprising a target sequence, thereby degrading the RNA. The disclosure provides interfering RNAs. The double stranded RNA molecule of the disclosure may be in the form of any type of RNA interference molecule known in the art. In some embodiments, the double stranded RNA molecule is a small interfering RNA (siRNA). In other embodiments, the double stranded RNA molecule is a short hairpin RNA (shRNA) molecule. In other embodiments, the double stranded RNA molecule is a Dicer substrate that is processed in a cell to produce an siRNA. In other embodiments the double stranded RNA molecule is part of a microRNA precursor molecule.

[0496] In some embodiments, the shRNA is a length to be suitable as a Dicer substrate, which can be processed to produce a RISC active siRNA molecule. See, e.g., Rossi et al., US2005/0244858.

[0497] A Dicer substrate double stranded RNA (e.g. a shRNA) can be of a length sufficient that it is processed by Dicer to produce an active siRNA, and may further include one or more of the following properties: (i) the Dicer substrate shRNA can be asymmetric, for example, having a 3′ overhang on the anti-sense strand, (ii) the Dicer substrate shRNA can have a modified 3′ end on the sense strand to direct orientation of Dicer binding and processing of the dsRNA to an active siRNA, for example the incorporation of one or more DNA nucleotides, and (iii) the first and second strands of the Dicer substrate ds RNA can be from 21-30 bp in length.

[0498] In some embodiments, the interfering RNAs comprise a sequence complementary to a sequence of a B2M mRNA. In some embodiments, the interfering RNA is capable of inducing RNAi-mediated degradation of the B2M mRNA. In some embodiments, the B2M mRNA sequence comprises a coding sequence. In some embodiments, the B2M mRNA sequence comprises an untranslated region.

[0499] In some embodiments, the interfering RNAs comprise a sequence complementary to a sequence of an HLA-A*02 mRNA. In some embodiments, the interfering RNA is capable of inducing RNAi-mediated degradation of the HLA-A*02 mRNA. In some embodiments, the HLA-A*02 mRNA sequence comprises a coding sequence. In some embodiments, the HLA-A*02 mRNA sequence comprises an untranslated region.

[0500] In some embodiments, the interfering RNA is a short hairpin RNA (shRNA). In some embodiments, the shRNA comprises a first sequence, having from 5′ to 3′ end a sequence complementary to the B2M mRNA; and a second sequence, having from 5′ to 3′ end a sequence complementary to the first sequence, wherein the first sequence and second sequence form the shRNA.

[0501] In some embodiments, the first sequence is 18, 19, 20, 21, or 22 nucleotides. In some embodiments, the first sequence is complementary to a sequence selected from the sequences set forth in Tables 13 and 14. In some embodiments, the first sequence has GC content greater than or equal to 25% and less than 60%. In some embodiments, the first sequence is complementary to a sequence selected from the sequences set forth in Tables 13 and 14. In some embodiments, the first sequence does not comprise four nucleotides of the same base or a run of seven C or G nucleotide bases. In some embodiments, the first sequence is 21 nucleotides.

[0502] Illustrative target B2M sequences complementary to the first sequence are shown in Table 13.

[0503] In some cases, the first sequence may have 100% identity, i.e. complete identity, homology, complementarity to the target nucleic acid sequence. In other cases, there may be one or more mismatches between the first sequence and the target nucleic acid sequence. For example, there may be 1, 2, 3, 4, 5, 6, or 7 mismatches between the sense region and the target nucleic acid sequence.

[0504] The sequences set forth in Table 13 are presented as DNA sequences. In all sequences set forth in Table 13, thymine (T) may be replaced by uracil (U) to arrive at the sequence of the target mRNA sequence.

TABLE 13
Illustrative target B2M sequences
complementary to first sequence

| SEQ ID | |
|---|---|
| NO | Sequence |
| 1008 | AGAGAATGGAAAGTCAAATTT |
| 1009 | ATGGACATGATCTTCTTTATA |
| 1010 | TGGACATGATCTTCTTTATAA |
| 1011 | GGACATGATCTTCTTTATAAT |
| 1012 | TGACAGGATTATTGGAAATTT |
| 1013 | TTGTGGTTAATCTGGTTTATT |
| 1014 | TGTGGTTAATCTGGTTTATTT |
| 1015 | GCAGAGAATGGAAAGTCAAAT |
| 1016 | CAGAGAATGGAAAGTCAAATT |
| 1017 | GAGAATGGAAAGTCAAATTTC |
| 1018 | GTCACAGCCCAAGATAGTTAA |
| 1019 | TGCTTATACACTTACACTTTA |
| 1020 | GCTTATACACTTACACTTTAT |
| 1021 | CTTATACACTTACACTTTATG |
| 1022 | ACATGGACATGATCTTCTTTA |
| 1023 | CATGGACATGATCTTCTTTAT |
| 1024 | ATCAACATCTTGGTCAGATTT |
| 1025 | CTTGCACTCAAAGCTTGTTAA |
| 1026 | AGTTAAGCGTGCATAAGTTAA |
| 1027 | GCATAAGTTAACTTCCAATTT |
| 1028 | TACATACTCTGCTTAGAATTT |
| 1029 | ACATACTCTGCTTAGAATTTG |
| 1030 | TTGACAGGATTATTGGAAATT |
| 1031 | GACAGGATTATTGGAAATTTG |
| 1032 | TAAGGCATGGTTGTGGTTAAT |
| 1033 | GTTGTGGTTAATCTGGTTTAT |
| 1034 | GTTCCACAAGTTAAATAAATC |
| 1035 | TCCAGCGTACTCCAAAGATTC |
| 1036 | TACTCCAAAGATTCAGGTTTA |
| 1037 | ACTCCAAAGATTCAGGTTTAC |
| 1038 | CACGTCATCCAGCAGAGAATG |
| 1039 | GGTTTCATCCATCCGACATTG |
| 1040 | CCGACATTGAAGTTGACTTAC |
| 1041 | TGAAGAATGGAGAGAGAATTG |
| 1042 | GAGCATTCAGACTTGTCTTTC |
| 1043 | TTCAGCAAGGACTGGTCTTTC |
| 1044 | GCAAGGACTGGTCTTTCTATC |
| 1045 | CGTGTGAACCATGTGACTTTG |
| 1046 | CTTTGTCACAGCCCAAGATAG |
| 1047 | TCACAGCCCAAGATAGTTAAG |
| 1048 | AGTGGGATCGAGACATGTAAG |
| 1049 | AGGTTTGAAGATGCCGCATTT |
| 1050 | GGTTTGAAGATGCCGCATTTG |
| 1051 | TTGATATGCTTATACACTTAC |
| 1052 | TGAGTGCTGTCTCCATGTTTG |
| 1053 | TGTCTCCATGTTTGATGTATC |
| 1054 | TCAACATCTTGGTCAGATTTG |
| 1055 | TCAGATTTGAACTCTTCAATC |
| 1056 | TTCAATCTCTTGCACTCAAAG |
| 1057 | TTGCACTCAAAGCTTGTTAAG |
| 1058 | ACTCAAAGCTTGTTAAGATAG |
| 1059 | AGATAGTTAAGCGTGCATAAG |
| 1060 | TGCATAAGTTAACTTCCAATT |
| 1061 | GTTAACTTCCAATTTACATAC |
| 1062 | ATTGACAGGATTATTGGAAAT |
| 1063 | GTAAGGCATGGTTGTGGTTAA |
| 1064 | GGTTGTGGTTAATCTGGTTTA |
| 1065 | TTCCTGAAGCTGACAGCATTC |
| 1066 | GCTATCCAGCGTACTCCAAAG |
| 1067 | CATCCAGCAGAGAATGGAAAG |
| 1068 | CAAATTTCCTGAATTGCTATG |
| 1069 | ATTGCTATGTGTCTGGGTTTC |
| 1070 | GAAGATGCCGCATTTGGATTG |
| 1071 | CAATTTACATACTCTGCTTAG |
| 1072 | TATCCAGCGTACTCCAAAGAT |
| 1073 | ATCCAGCGTACTCCAAAGATT |
| 1074 | CTCCAAAGATTCAGGTTTACT |
| 1075 | TGCTATGTGTCTGGGTTTCAT |
| 1076 | TTTCATCCATCCGACATTGAA |
| 1077 | GAAGTTGACTTACTGAAGAAT |
| 1078 | GAAGAATGGAGAGAGAATTGA |
| 1079 | AGAATGGAGAGAGAATTGAAA |
| 1080 | CAGCAAGGACTGGTCTTTCTA |
| 1081 | AGCAAGGACTGGTCTTTCTAT |
| 1082 | ACTTTGTCACAGCCCAAGATA |
| 1083 | TTGTCACAGCCCAAGATAGTT |
| 1084 | TGTCACAGCCCAAGATAGTTA |
| 1085 | CACAGCCCAAGATAGTTAAGT |
| 1086 | GCAGCATCATGGAGGTTTGAA |
| 1087 | CCGCATTTGGATTGGATGAAT |
| 1088 | TTGAGTGCTGTCTCCATGTTT |
| 1089 | AGTGCTGTCTCCATGTTTGAT |
| 1090 | CTGTCTCCATGTTTGATGTAT |
| 1091 | TCTAGGAGGGCTGGCAACTTA |
| 1092 | CAACATCTTGGTCAGATTTGA |
| 1093 | GTCAGATTTGAACTCTTCAAT |
| 1094 | TCTTGCACTCAAAGCTTGTTA |
| 1095 | TGCACTCAAAGCTTGTTAAGA |
| 1096 | GCACTCAAAGCTTGTTAAGAT |
| 1097 | CACTCAAAGCTTGTTAAGATA |
| 1098 | TCAAAGCTTGTTAAGATAGTT |
| 1099 | CAAAGCTTGTTAAGATAGTTA |
| 1100 | GATAGTTAAGCGTGCATAAGT |
| 1101 | ATAGTTAAGCGTGCATAAGTT |
| 1102 | TAGTTAAGCGTGCATAAGTTA |
| 1103 | TTAAGCGTGCATAAGTTAACT |
| 1104 | TAAGCGTGCATAAGTTAACTT |
| 1105 | ATTTACATACTCTGCTTAGAA |
| 1106 | TTTACATACTCTGCTTAGAAT |
| 1107 | ACAGGATTATTGGAAATTTGT |
| 1108 | CAGGATTATTGGAAATTTGTT |
| 1109 | AGGCATGGTTGTGGTTAATCT |
| 1110 | CAGCAGAGAATGGAAAGTCAA |
| 1111 | TCCGACATTGAAGTTGACTTA |
| 1112 | CTGGTCTTTCTATCTCTTGTA |
| 1113 | CCGTGTGAACCATGTGACTTT |
| 1114 | CCCAAGATAGTTAAGTGGGAT |
| 1115 | GGTTGCTCCACAGGTAGCTCT |
| 1116 | GCTCCACAGGTAGCTCTAGGA |
| 1117 | GGGAGCAGAGAATTCTCTTAT |
| 1118 | GGAGCAGAGAATTCTCTTATC |
| 1119 | GAGCAGAGAATTCTCTTATCC |
| 1120 | GAGAATTCTCTTATCCAACAT |
| 1121 | GAATTCTCTTATCCAACATCA |
| 1122 | AAGTGGAGCATTCAGACTTGT |
| 1123 | AAGGACTGGTCTTTCTATCTC |
| 1124 | AAGCTTGTTAAGATAGTTAAG |
| 1125 | AAGCGTGCATAAGTTAACTTC |
| 1126 | AAGATGCCGCATTTGGATTGG |
| 1127 | AAGAATGGAGAGAGAATTGAA |
| 1128 | AACATCAACATCTTGGTCAGA |
| 1129 | AAGGCATGGTTGTGGTTAATC |
| 1130 | AAGCAGCATCATGGAGGTTTG |
| 1131 | AAGATGAGTATGCCTGCCGTG |
| 1132 | AAGTTGACTTACTGAAGAATG |
| 1133 | AAGATAGTTAAGCGTGCATAA |
| 1134 | AACTTCCAATTTACATACTCT |
| 1135 | AACATCTTGGTCAGATTTGAA |
| 1136 | AACTCTTCAATCTCTTGCACT |
| 1137 | AATTTCCTGAATTGCTATGTG |
| 1138 | AATGGAAAGTCAAATTTCCTG |
| 1139 | AACCATGTGACTTTGTCACAG |
| 1140 | AATTGACAGGATTATTGGAAA |
| 1141 | AATTCTCTTATCCAACATCAA |
| 1142 | AAAGTGGAGCATTCAGACTTG |
| 1143 | AAAGTCAAATTTCCTGAATTG |
| 1144 | GTTGCTCCACAGGTAGCTCTA |
| 1145 | AATTTACATACTCTGCTTAGA |

[0505] An exemplary sequence encoding a B2M shRNA comprises a sequence of GCACTCAAAGCTTGTTAAGATCGAAATCTTAACAAGCTTTGAGTGC (SEQ ID NO: 349), or a sequence having at least 90%, at least 95%, at least 97% or at least 99% identity thereto. A further exemplary sequence encoding a B2M shRNA comprises a sequence of GTTAACTTCCAATTTACATACCGAAGTATGTAAATTGGAAGTTAAC (SEQ ID NO: 350), or a sequence having at least 90%, at least 95%, at least 97% or at least 99% identity thereto.

[0506] In some embodiments, the interfering RNAs comprise a sequence complementary to a sequence of an HLA-A*02 mRNA. In some embodiments, the interfering RNA is capable of inducing RNAi-mediated degradation of the HLA-A*02 mRNA. In some embodiments, the HLA-A*02 mRNA sequence comprises a coding sequence. In some embodiments, the HLA-A*02 mRNA sequence comprises an untranslated region.

[0507] In some embodiments, the interfering RNA is a short hairpin RNA (shRNA). In some embodiments, the shRNA comprises a first sequence, having from 5′ to 3′ end a sequence complementary to the HLA-A*02 mRNA; and a second sequence, having from 5′ to 3′ end a sequence complementary to the first sequence, wherein the first sequence and second sequence form the shRNA

[0508] Illustrative target HLA sequences complementary to the first sequence are shown in Table 14.

TABLE 14
Illustrative target HLA sequences
complementary to first sequence

| SEQ ID | |
|---|---|
| NO | Sequence |
| 1146 | CTTCTTCCTTCCCTATTAAAA |
| 1147 | TCTCACTCCATGAGGTATTTC |
| 1148 | CTCTCACTCCATGAGGTATTT |
| 1149 | GAGGAGGAAGAGCTCAGATAG |
| 1150 | GCTCTCACTCCATGAGGTATT |
| 1151 | AGGATTACATCGCCCTGAAAG |
| 1152 | ACACCGTCCAGAGGATGTATG |
| 1153 | AGGGTCCTTCTTCCTGGATAC |
| 1154 | CCTACGACGGCAAGGATTACA |
| 1155 | TCACTCCATGAGGTATTTCTT |
| 1156 | CTACGACGGCAAGGATTACAT |
| 1157 | CTCACTCCATGAGGTATTTCT |
| 1158 | GGAGGAAGAGCTCAGATAGAA |
| 1159 | CACACCGTCCAGAGGATGTAT |
| 1160 | CACGCTGTCTCTGACCATGAA |
| 1161 | CTGGACAGGAGCAGAGATACA |
| 1162 | TGGAGGAGGAAGAGCTCAGAT |
| 1163 | GGCTCTCACTCCATGAGGTAT |
| 1164 | CATCTCTGTCTCAACTTCATG |
| 1165 | TACGACGGCAAGGATTACATC |
| 1166 | GGATTACATCGCCCTGAAAGA |
| 1167 | GATTACATCGCCCTGAAAGAG |
| 1168 | CTCAGACCACCAAGCACAAGT |
| 1169 | TCACACCGTCCAGAGGATGTA |
| 1170 | ACTCCATGAGGTATTTCTTCA |
| 1171 | CACTCCATGAGGTATTTCTTC |
| 1172 | CCATGAGGTATTTCTTCACAT |
| 1173 | ACTTCTTCCTTCCCTATTAAA |
| 1174 | GTGTCTCTCACAGCTTGTAAA |
| 1175 | CTGTGTTCGTGTAGGCATAAT |
| 1176 | TGTGTTCGTGTAGGCATAATG |
| 1177 | TAACTTCTTCCTTCCCTATTA |
| 1178 | TCTGGACAGGAGCAGAGATAC |
| 1179 | TTGCTGGCCTGGTTCTCTTTG |
| 1180 | TGTCTCTCACAGCTTGTAAAG |
| 1181 | ACTTGAAGAACCCTGACTTTG |
| 1182 | GAAGAACCCTGACTTTGTTTC |
| 1183 | TCTGTGTTCGTGTAGGCATAA |
| 1184 | CATGGTGCACTGAGCTGTAAC |
| 1185 | GTAACTTCTTCCTTCCCTATT |
| 1186 | CATGTGCAGCATGAGGGTTTG |
| 1187 | TTGTTCCTGCCCTTCCCTTTG |
| 1188 | ACCCAGTTCTCACTCCCATTG |
| 1189 | GGGTTTCCAGAGAAGCCAATC |
| 1190 | TTCTCCCTCTCCCAACCTATG |
| 1191 | GTCTCTCACAGCTTGTAAAGT |
| 1192 | TGTGTCTCTCACAGCTTGTAA |
| 1193 | GAGGAAGAGCTCAGATAGAAA |
| 1194 | TGAAGAACCCTGACTTTGTTT |
| 1195 | TTGAAGAACCCTGACTTTGTT |
| 1196 | GTGTTCGTGTAGGCATAATGT |
| 1197 | TGGTGCACTGAGCTGTAACTT |
| 1198 | CTCCCTCTCCCAACCTATGTA |
| 1199 | AGGAGGAAGAGCTCAGATAGA |
| 1200 | ACCTATGTAGGGTCCTTCTTC |
| 1201 | GGGTCCTTCTTCCTGGATACT |
| 1202 | GGTCCTTCTTCCTGGATACTC |
| 1203 | GTCCTTCTTCCTGGATACTCA |
| 1204 | AAGCCAATCAGTGTCGTCGCG |
| 1205 | AAGAGGACCTGCGCTCTTGGA |
| 1206 | AAGTGTGAGACAGCTGCCTTG |
| 1207 | AAGGCACCTGCATGTGTCTGT |
| 1208 | AATCATCTTTCCTGTTCCAGA |
| 1209 | AAAGGCACCTGCATGTGTCTG |
| 1210 | AAAGAGGACCTGCGCTCTTGG |
| 1211 | AAACGCATATGACTCACCACG |
| 1212 | GGAAGAGCTCAGATAGAAA |
| 1213 | GGGAGACACGGAAAGTGAA |
| 1214 | CACCTGCCATGTGCAGCATGA |
| 1215 | GGAGATCACACTGACCTGGCA |
| 1216 | GGATTACATCGCCCTGAAAG |
| 1217 | GCAGGAGGGTCCGGAGTATT |
| 1218 | GGACGGGGAGACACGGAAAG |
| 1219 | GAAAGTGAAGGCCCACTCA |
| 1220 | GATACCTGGAGAACGGGAAG |
| 1221 | GCTGTGGTGGTGCCTTCTGG |
| 1222 | GCTACTACAACCAGAGCGAG |
| 1223 | GTGGCTCCGCAGATACCTG |
| 1224 | GCCAATCAGTGTCGTCGCG |
| 1225 | GAGGACCTGCGCTCTTGGA |
| 1226 | GTGTGAGACAGCTGCCTTG |
| 1227 | GGCACCTGCATGTGTCTGT |
| 1228 | TCATCTTTCCTGTTCCAGA |
| 1229 | AGGCACCTGCATGTGTCTG |
| 1230 | AGAGGACCTGCGCTCTTGG |
| 1231 | ACGCATATGACTCACCACG |

[0509] In some embodiments, the first sequence and second sequence are separated by a linker, sometimes referred to as a loop. In some embodiments, both the first sequence and the second sequence are encoded by one single-stranded RNA or DNA vector. In some embodiments, the loop is between the first and second sequences. In these embodiments, and the first sequence and the second sequence hybridize to form a duplex region. The first sequence and second sequence are joined by a linker sequence, forming a “hairpin” or “stem-loop” structure. The shRNA can have complementary first sequences and second sequences at opposing ends of a single stranded molecule, so that the molecule can form a duplex region with the complementary sequence portions, and the strands are linked at one end of the duplex region by a linker (i.e. loop sequence). The linker, or loop sequence, can be either a nucleotide or non-nucleotide linker. The linker can interact with the first sequence, and optionally, second sequence through covalent bonds or non-covalent interactions.

[0510] Any suitable nucleotide loop sequence is envisaged as within the scope of the disclosure. An shRNA of this disclosure may include a nucleotide, non-nucleotide, or mixed nucleotide/non-nucleotide linker that joins the first sequence of the shRNA to the second sequence of the shRNA. A nucleotide loop sequence can be >2 nucleotides in length, for example about 4, 5, 6, 7, 8, 9, 10, 11, 12, 13, 14, or 15 nucleotides in length. Illustrative loop sequences are disclosed in Table 16.

[0511] In some embodiments, the shRNA further comprises a 5′ flank sequence and a 3′ flank sequence. In some embodiments, wherein the 5′ flank sequence is joined to the 5′ end of the first sequence, and wherein the 3′ flank sequence is joined to the 3′ end of the second sequence.

[0512] Without wishing to be bound by theory, it is thought that flanking shRNA stem loop sequence with 5′ and 3′ sequences similar to those found in microRNAs can target the shRNA for processing by the endogenous microRNA processing machinery, increasing the effectiveness of shRNA processing. Alternatively, or in addition, flanking sequences may increase shRNA compatibility with polymerase II or polymerase III promoters, leading to more effective regulation of shRNA expression.

[0513] In some embodiments, the 5′ flank sequence is selected from the sequences set forth in Table 15. Illustrative flank sequence are shown in Table 15.

TABLE 15
Illustrative flank sequences

| SEQ ID NO | 5’ Flank Sequence |
|---|---|
| 1232 | GG |
| 1233 | ACACCAUGUUGCCAGUCUCUAGG |
| 1234 | UGAUAGCAAUGUCAGCAGUGCCU |
| 1235 | UAUUGCUGUUGACAGUGAGCGAC |
| SEQ ID NO | 3’ Flank Sequence |
| 1236 | UGGCGUCUGGCCCAACCACAC |
| 1237 | GUAAGGUUGACCAUACUCUAC |

[0514] In some embodiments, the first and second sequence are present on a single stranded polynucleotide, wherein the first sequence and second sequence are separated by 4, 5, 6, 7, 8, 9, 10, 11, 12, 13, 14, or 15 nucleotides, wherein the 4, 5, 6, 7, 8, 9, 10, 11, 12, 13, 14, or 15 nucleotides form a loop region in the shRNA. In some embodiments, the loop region comprises a sequence selected from the sequences set forth in Table 16.

TABLE 16
Illustrative loop region sequences

| SEQ ID NO | Loop Region Sequence |
|---|---|
| 1238 | CGAA |
| 1239 | UUCAAGA |
| 1240 | AUAUUCA |
| 1241 | UGUGCUGUC |
| 1242 | CUCGAG |
| 1243 | CUUCCUGUCAGA |
| 1244 | CUUCCCUUUGUCAGA |
| 1245 | GUGUUAUUCUUG |
| 1246 | GUGUCUUAAUUG |
| 1247 | GUGUUAGUCUUG |
| 1248 | UCAAGAG |
| 1249 | GGACAUCCAGGG |
| 1250 | GUGAAGCCACAGAUG |
| 1251 | GAUUCUAAAA |

[0515] shRNAs of the disclosure may be generated exogenously by chemical synthesis, by in vitro transcription, or by cleavage of longer double-stranded RNA with Dicer or another appropriate nuclease with similar activity. Chemically synthesized siRNAs, produced from protected ribonucleoside phosphoramidites using a conventional DNA/RNA synthesizer, may be obtained from commercial suppliers such as Millipore Sigma (Houston, Tex.), Ambion Inc. (Austin, Tex.). Invitrogen (Carlsbad, Calif), or Dharmacon (Lafayette, Colo.). siRNAs can be purified by extraction with a solvent or resin, precipitation, electrophoresis, chromatography, or a combination thereof, for example. Alternatively, siRNAs may be used with little if any purification to avoid losses due to sample processing.

[0516] In some embodiments, shRNAs of the disclosure can be produced using an expression vector into which a nucleic acid encoding the double stranded RNA has been cloned, for example under control of a suitable promoter.

### Pharmaceutical Compositions

[0517] The disclosure provides pharmaceutical compositions comprising immune cells comprising the first and second receptors of the disclosure and a pharmaceutically acceptable diluent, carrier or excipient.

[0518] Such compositions may comprise buffers such as neutral buffered saline, phosphate buffered saline and the like; carbohydrates such as glucose, mannose, sucrose or dextrans, mannitol; proteins; polypeptides or amino acids such as glycine; antioxidants; chelating agents such as EDTA or glutathione; and preservatives.

[0519] In some embodiments, the immune cell expresses both the first receptor and the second receptor. In some embodiments, at least about 50%, about 55%, about 60%, about 65%, about 70%, about 75%, about 80%, about 85%, about 90%, or about 95% of the immune cells express both the first receptor and the second receptor. In some embodiments, at least 90% of the immune cells express both the first receptor and the second receptor.

### Treating Cancer

[0520] Provided herein are methods of killing a plurality of cancer cells, or treating cancer, in a subject, comprising administering to the subject a therapeutically effective amount of a composition comprising immune cells comprising the first and second receptors of the disclosure. The immune cells express both receptors in the same cell.

[0521] Cancer is a disease in which abnormal cells divide without control and spread to nearby tissue. In some embodiments, the cancer comprises a liquid tumor or a solid tumor. Exemplary liquid tumors include leukemias and lymphomas. Cancers can arise in virtually an organ in the body, including epithelial tissues. Any cancer wherein a plurality of the cancer cells express the first, activator, ligand and do not express the second, inhibitor ligand is envisaged as within the scope of the instant disclosure. For example, MSLN positive cancers that can be treated using the methods described herein include mesothelioma, ovarian cancer, cervical cancer, uterine cancer, gastric cancer, pancreatic cancer, lung cancers such as lung adenocarcinomas, colorectal cancer and cholangiocarcinoma.

[0522] In some embodiments, the plurality of cancer cells express the target antigen. In some embodiments, the plurality cancer cells of the subject express MSLN. MSNL positive cancers include mesothelioma cancer, ovarian cancer, cervical cancer, colorectal cancer, esophageal cancer, head and neck cancer, kidney cancer, uterine cancer, gastric cancer, pancreatic cancer, lung cancer, lung adenocarcinomas, colorectal cancer, or cholangiocarcinoma, as well as other solid epithelial tumors. Further cancers that express MSLN include relapsed, refractory or metastatic gastric, esophageal, head and neck and kidney cancers. In some embodiments, the MSLN positive cancer comprises an epithelial tumor, for example a carcinoma.

[0523] Provided herein are methods of treating MSLN+ cancer in a subject having a MSLN+ tumor, the tumor having loss of heterozygosity at an MHC class I locus. In some embodiments, the methods comprise administering to the subject an effective amount of the immune cells or pharmaceutical compositions described herein. In some embodiments, the methods comprise (a) determining HLA-A, HLA-B, or HLA-C genotype or expression of normal cells and a plurality of cancer cells of the subject; (b) determining the expression of MSLN in a plurality of cancer cells of the subject; and (c) administering to the subject an effective amount of the immune cells or pharmaceutical compositions of the disclosure if the normal cells express an HLA-A, HLA-B or HLA-C non-target antigen and the plurality of cancer cells do not express the HLA-A, HLA-B or HLA-C non-target antigen, and the plurality of cancer cells are also MSLN-positive. In some embodiments, for example those embodiments where the cancer is known to be MSLN+, the methods comprise (a) determining HLA-A, HLA-B or HLA-C genotype or expression of normal cells and a plurality of cancer cells of the subject; and (b) administering to the subject an effective amount of the immune cells or pharmaceutical compositions of the disclosure if the normal cells express an HLA-A, HLA-B or HLA-C non-target antigen and the plurality of cancer cells do not express the non-target antigen. In some embodiments, the non-target antigen comprises HLA-A*02, HLA-A*01, HLA-A*03, HLA-A*11, HLA-B*07 or HLA-C*07.

[0524] In some embodiments, a plurality of cancer cells do not express a polymorphic allele of ICAM1, COMT or CXCL16. For example, the cancer cells have lost an allele of CAM1, COMT or CXCL16 through loss of heterozygosity at that locus.

[0525] In some embodiments, the plurality of cancer cells do not express, or have lower expression than normal cells, of LRRN4 or UPK3B.

[0526] The disclosure provides methods of treating a cancer in a subject comprising: (a) determining the genotype of normal cells and a plurality of cancer cells of the subject at a polymorphic locus selected from the group consisting of a polymorphic locus of ICAM1, a polymorphic locus of COMT and a polymorphic locus of CXCL16; (b) determining the expression of MSLN in a plurality of cancer cells; and (c) administering a plurality of immune cells to the subject if the normal cells are heterozygous for the polymorphic locus and the plurality of cancer cells are hemizygous for the polymorphic locus, and the plurality of cancer cells are MSLN positive, wherein the plurality of immune cells comprise: (i) a first receptor, optionally a chimeric antigen receptor (CAR) or T cell receptor (TCR), comprising an extracellular ligand binding domain specific to MSLN, or a peptide antigen thereof in a complex with a major histocompatibility complex class I (MHC-I); and (ii) a second receptor, optionally an inhibitory chimeric antigen receptor, comprising an extracellular ligand binding specific to a non-target antigen selected from ICAM1, COMT, and CXCL16, or an antigen peptide thereof in a complex with an a major histocompatibility complex class I (MHC-I), wherein the non-target antigen comprises a polymorphism.

[0527] Methods of genotyping cancer cells and normal cells from a subject for the presence or absence of SNPs will be readily apparent to persons of ordinary skill in the art. SNP genotyping methods include, inter alia, PCR based methods such as dual-probe TaqMan assays, array based hybridization methods and sequencing.

[0528] Methods of measuring the expression of the target antigen in cancer or normal cells from a subject will be readily apparent to persons of ordinary skill in the art. These include, inter alia, methods of measuring RNA expression such as RNA sequencing and reverse transcription polymerase chain reaction (RT-PCR), as well as methods of measuring protein expression such as immunohistochemistry based methods. Methods of measuring loss of heterozygosity in a plurality of cancer cells, include, inter alia, high throughput sequencing of genomic DNA extracted from cancer cells using methods known in the art.

[0529] The disclosure provides methods of treating a cancer in a subject comprising measuring the expression level of the non-target antigen in a plurality of cancer cells, and treating the subject when the expression level of the non-target antigen in the plurality of cancer cells is less than the expression level of the non-target antigen in the plurality of cancer cells is less than the expression level of the non-target antigen a plurality of healthy cells. In some embodiments, the non-target antigen comprises LRRN4 or UPKB3, or a peptide antigen of LRRN4 or UPKB3. In some embodiments, the methods comprise determining the expression of MSLN in a plurality of cancer cells; and administering a plurality of immune cells to the subject if the plurality of cancer cells have low or no expression of the non-target antigen, and the plurality of cancer cells are MSLN positive. Methods of measuring the expression of the target antigen in cancer or cells from a subject will be readily apparent to persons of ordinary skill in the art. These include, inter alia, methods of measuring RNA expression such as RNA sequencing and reverse transcription polymerase chain reaction (RT-PCR), as well as methods of measuring protein expression such as immunohistochemistry based methods.

[0530] In some embodiments, the immune cells are T cells.

[0531] In some embodiments, the immune cells are allogeneic or autologous.

[0532] In some embodiments, the second receptor increases the specificity of the immune cells for the MSLN positive cancer cells compared to immune cells that express the first receptor but do not express the second receptor. In some embodiments, the immune cells have reduced side effects compared to immune cells that express the first receptor but do not express the second receptor.

[0533] Administration of the immune cells or pharmaceutical compositions described herein can arrest the growth of a tumor in the subject. For example, the immune cells or pharmaceutical compositions can kill tumor cells, so that the tumor stops growing, or is reduced in size. In some cases, immune cells or pharmaceutical compositions can prevent formation of additional tumors, or reduce the total number of tumors in the subject.

[0534] Administration of the immune cells or pharmaceutical compositions described herein can result in selective killing of a cancer cell but not a wild-type cell in the subject. In some embodiments, about 60% of the cells killed are cancer cells, about 65% of the cells killed are cancer cells, about 70% of the cells killed are cancer cells, about 75% of the cells killed are cancer cells, about 80% of the cells killed are cancer cells, about 85% of the cells killed are cancer cells, about 90% of the cells killed are cancer cells, about 95% of the cells killed are cancer cells, or about 100% of the cells killed are cancer cells.

[0535] Administration of the immune cells or pharmaceutical compositions described herein can result in the killing of about 40%, about 50%, about 60%, about 70%, about 80%, about 90% or all of the cancer cells of the subject.

[0536] Administration of the immune cells or pharmaceutical compositions described herein can result in fewer side effects for the subject than administration of an otherwise equivalent immune cell comprising the first activator receptor but no second inhibitory receptor. For example, administering the immune cells or pharmaceutical compositions described herein can reduce dose limited toxicity relative to the MSLN CAR, or MSLN TCR administered without the second inhibitory receptor.

[0537] Treating cancer can result in a reduction in size of a tumor. A reduction in size of a tumor may also be referred to as “tumor regression”. Preferably, after treatment, tumor size is reduced by 5% or greater relative to its size prior to treatment; more preferably, tumor size is reduced by 10% or greater; more preferably, reduced by 20% or greater; more preferably, reduced by 30% or greater; more preferably, reduced by 40% or greater; even more preferably, reduced by 50% or greater; and most preferably, reduced by greater than 75% or greater. Size of a tumor may be measured by any reproducible means of measurement. The size of a tumor may be measured as a diameter of the tumor.

[0538] Treating cancer can result in a reduction in tumor volume. Preferably, after treatment, tumor volume is reduced by 5% or greater relative to its size prior to treatment; more preferably, tumor volume is reduced by 10% or greater; more preferably, reduced by 20% or greater; more preferably, reduced by 30% or greater; more preferably, reduced by 40% or greater; even more preferably, reduced by 50% or greater; and most preferably, reduced by greater than 75% or greater. Tumor volume may be measured by any reproducible means of measurement.

[0539] Administration of the immune cells or pharmaceutical compositions described herein can reduce the size of a tumor in the subject. In some embodiments, the size of the tumor is reduced by about 5%, about 10%, about 15%, about 20%, about 25%, about 30%, about 35%, about 40%, about 45%, about 50%, about 55%, about 60%, about 65%, about 70%, about 75%, about 80%, about 85%, about 90%, about 95%, or about 100%, relative to the size of the tumor before administration of the immune cells or pharmaceutical compositions. In some embodiments, the tumor is eliminated.

[0540] Treating cancer results in a decrease in number of tumors. Preferably, after treatment, tumor number is reduced by 5% or greater relative to number prior to treatment; more preferably, tumor number is reduced by 10% or greater; more preferably, reduced by 20% or greater; more preferably, reduced by 30% or greater; more preferably, reduced by 40% or greater; even more preferably, reduced by 50% or greater; and most preferably, reduced by greater than 75%. Number of tumors may be measured by any reproducible means of measurement. The number of tumors may be measured by counting tumors visible to the naked eye or at a specified magnification. Preferably, the specified magnification is 2×, 3×, 4×, 5×, 10×, or 50×.

[0541] Treating cancer can result in a decrease in number of metastatic lesions in other tissues or organs distant from the primary tumor site. Preferably, after treatment, the number of metastatic lesions is reduced by 5% or greater relative to number prior to treatment; more preferably, the number of metastatic lesions is reduced by 10% or greater; more preferably, reduced by 20% or greater; more preferably, reduced by 30% or greater; more preferably, reduced by 40% or greater; even more preferably, reduced by 50% or greater; and most preferably, reduced by greater than 75%. The number of metastatic lesions may be measured by any reproducible means of measurement. The number of metastatic lesions may be measured by counting metastatic lesions visible to the naked eye or at a specified magnification. Preferably, the specified magnification is 2×, 3×, 4×, 5×, 10×, or 50×.

[0542] Treating cancer can result in an increase in average survival time of a population of treated subjects in comparison to a population receiving carrier alone. Preferably, the average survival time is increased by more than 30 days; more preferably, by more than 60 days; more preferably, by more than 90 days; and most preferably, by more than 120 days. An increase in average survival time of a population may be measured by any reproducible means. An increase in average survival time of a population may be measured, for example, by calculating for a population the average length of survival following initiation of treatment with an active compound. An increase in average survival time of a population may also be measured, for example, by calculating for a population the average length of survival following completion of a first round of treatment with an active compound.

[0543] Treating cancer can result in an increase in average survival time of a population of treated subjects in comparison to a population of untreated subjects. Preferably, the average survival time is increased by more than 30 days; more preferably, by more than 60 days; more preferably, by more than 90 days; and most preferably, by more than 120 days. An increase in average survival time of a population may be measured by any reproducible means. An increase in average survival time of a population may be measured, for example, by calculating for a population the average length of survival following initiation of treatment with an active compound. An increase in average survival time of a population may also be measured, for example, by calculating for a population the average length of survival following completion of a first round of treatment with an active compound.

[0544] Treating cancer can result in increase in average survival time of a population of treated subjects in comparison to a population receiving monotherapy with a drug that is not a compound of the present disclosure, or a pharmaceutically acceptable salt, prodrug, metabolite, analog or derivative thereof. Preferably, the average survival time is increased by more than 30 days; more preferably, by more than 60 days; more preferably, by more than 90 days; and most preferably, by more than 120 days. An increase in average survival time of a population may be measured by any reproducible means. An increase in average survival time of a population may be measured, for example, by calculating for a population the average length of survival following initiation of treatment with an active compound. An increase in average survival time of a population may also be measured, for example, by calculating for a population the average length of survival following completion of a first round of treatment with an active compound.

[0545] Treating cancer can result in a decrease in the mortality rate of a population of treated subjects in comparison to a population receiving carrier alone. Treating cancer can result in a decrease in the mortality rate of a population of treated subjects in comparison to an untreated population. Treating cancer can result in a decrease in the mortality rate of a population of treated subjects in comparison to a population receiving monotherapy with a drug that is not a compound of the present disclosure, or a pharmaceutically acceptable salt, prodrug, metabolite, analog or derivative thereof. Preferably, the mortality rate is decreased by more than 2%; more preferably, by more than 5%; more preferably, by more than 10%; and most preferably, by more than 25%. A decrease in the mortality rate of a population of treated subjects may be measured by any reproducible means. A decrease in the mortality rate of a population may be measured, for example, by calculating for a population the average number of disease-related deaths per unit time following initiation of treatment with an active compound. A decrease in the mortality rate of a population may also be measured, for example, by calculating for a population the average number of disease-related deaths per unit time following completion of a first round of treatment with an active compound.

[0546] Treating cancer can result in a decrease in tumor growth rate. Preferably, after treatment, tumor growth rate is reduced by at least 5% relative to number prior to treatment; more preferably, tumor growth rate is reduced by at least 10%; more preferably, reduced by at least 20%; more preferably, reduced by at least 30%; more preferably, reduced by at least 40%; more preferably, reduced by at least 50%; even more preferably, reduced by at least 50%; and most preferably, reduced by at least 75%. Tumor growth rate may be measured by any reproducible means of measurement. Tumor growth rate can be measured according to a change in tumor diameter per unit time.

[0547] Treating cancer can result in a decrease in tumor regrowth. Preferably, after treatment, tumor regrowth is less than 5%; more preferably, tumor regrowth is less than 10%; more preferably, less than 20%; more preferably, less than 30%; more preferably, less than 40%; more preferably, less than 50%; even more preferably, less than 50%; and most preferably, less than 75%. Tumor regrowth may be measured by any reproducible means of measurement. Tumor regrowth is measured, for example, by measuring an increase in the diameter of a tumor after a prior tumor shrinkage that followed treatment. A decrease in tumor regrowth is indicated by failure of tumors to reoccur after treatment has stopped.

[0548] Treating or preventing a cancer can result in a reduction in the rate of cellular proliferation. Preferably, after treatment, the rate of cellular proliferation is reduced by at least 5%; more preferably, by at least 10%; more preferably, by at least 20%; more preferably, by at least 30%; more preferably, by at least 40%; more preferably, by at least 50%; even more preferably, by at least 50%; and most preferably, by at least 75%. The rate of cellular proliferation may be measured by any reproducible means of measurement. The rate of cellular proliferation is measured, for example, by measuring the number of dividing cells in a tissue sample per unit time.

[0549] Treating or preventing cancer can result in a reduction in the proportion of proliferating cells. Preferably, after treatment, the proportion of proliferating cells is reduced by at least 5%; more preferably, by at least 10%; more preferably, by at least 20%; more preferably, by at least 30%; more preferably, by at least 40%; more preferably, by at least 50%; even more preferably, by at least 50%; and most preferably, by at least 75%. The proportion of proliferating cells may be measured by any reproducible means of measurement. Preferably, the proportion of proliferating cells is measured, for example, by quantifying the number of dividing cells relative to the number of nondividing cells in a tissue sample. The proportion of proliferating cells can be equivalent to the mitotic index.

[0550] Treating or preventing cancer can result in a decrease in size of an area or zone of cellular proliferation. Preferably, after treatment, size of an area or zone of cellular proliferation is reduced by at least 5% relative to its size prior to treatment; more preferably, reduced by at least 10%; more preferably, reduced by at least 20%; more preferably, reduced by at least 30%; more preferably, reduced by at least 40%; more preferably, reduced by at least 50%; even more preferably, reduced by at least 50%; and most preferably, reduced by at least 75%. Size of an area or zone of cellular proliferation may be measured by any reproducible means of measurement. The size of an area or zone of cellular proliferation may be measured as a diameter or width of an area or zone of cellular proliferation.

[0551] Treating or preventing cancer can result in a decrease in the number or proportion of cells having an abnormal appearance or morphology. Preferably, after treatment, the number of cells having an abnormal morphology is reduced by at least 5% relative to its size prior to treatment; more preferably, reduced by at least 10%; more preferably, reduced by at least 20%; more preferably, reduced by at least 30%; more preferably, reduced by at least 40%; more preferably, reduced by at least 50%; even more preferably, reduced by at least 50%; and most preferably, reduced by at least 75%. An abnormal cellular appearance or morphology may be measured by any reproducible means of measurement. An abnormal cellular morphology can be measured by microscopy, e.g., using an inverted tissue culture microscope. An abnormal cellular morphology can take the form of nuclear pleiomorphism.

### Dosage and Administration

[0552] The immune cells and of the present disclosure may be administered in a number of ways depending upon whether local or systemic treatment is desired.

[0553] In general, administration may be parenteral.

[0554] Methods for administration of cells for adoptive cell therapy are known and may be used in connection with the provided methods and compositions. For example, adoptive T cell therapy methods are described, e.g., in US Patent Application Publication No. 2003/0170238 to Gruenberg et al and U.S. Pat. No. 4,690,915 to Rosenberg.

[0555] The compositions of the disclosure are suitable for parenteral administration. As used herein, “parenteral administration” of a pharmaceutical composition includes any route of administration characterized by physical breaching of a tissue of a subject and administration of the pharmaceutical composition through the breach in the tissue, thus generally resulting in the direct administration into the blood stream, into muscle, or into an internal organ. Parenteral administration thus includes, but is not limited to, administration of a pharmaceutical composition by injection of the composition, by application of the composition through a surgical incision, by application of the composition through a tissue-penetrating non-surgical wound, and the like. In particular, parenteral administration is contemplated to include, but is not limited to, subcutaneous, intraperitoneal, intramuscular, intrasternal, intravenous, intraarterial, intrathecal, intraventricular, intraurethral, intracranial, intratumoral, intrasynovial injection or infusions; and kidney dialytic infusion techniques. In some embodiments, parenteral administration of the compositions of the present disclosure comprises intravenous or intraarterial administration.

[0556] The disclosure provides pharmaceutical compositions comprising a plurality of immune cells of the disclosure, and a pharmaceutically acceptable carrier, diluent or excipient.

[0557] Formulations of a pharmaceutical composition suitable for parenteral administration typically generally comprise of immune cells combined with a pharmaceutically acceptable carrier, such as sterile water or sterile isotonic saline. Such formulations may be prepared, packaged, or sold in a form suitable for bolus administration or for continuous administration. Injectable formulations may be prepared, packaged, or sold in unit dosage form, such as in ampoules or in multi-dose containers containing a preservative. Formulations for parenteral administration include, but are not limited to, suspensions, solutions, emulsions in oily or aqueous vehicles, pastes, and the like. Such formulations may further comprise one or more additional ingredients including, but not limited to, suspending, stabilizing, or dispersing agents. Parenteral formulations also include aqueous solutions which may contain excipients such as salts, carbohydrates and buffering agents. Exemplary parenteral administration forms include solutions or suspensions in sterile aqueous solutions, for example, aqueous propylene glycol or dextrose solutions. Such dosage forms can be suitably buffered, if desired. Formulations for parenteral administration may be formulated to be immediate and/or modified release. Modified release formulations include delayed-, sustained-, pulsed-, controlled-, targeted and programmed release.

[0558] In some embodiments, the formulated composition comprising the immune cells is suitable for administration via injection. In some embodiments, the formulated composition comprising the immune cells is suitable for administration via infusion.

[0559] The pharmaceutical compositions of the present disclosure, which may conveniently be presented in unit dosage form, may be prepared according to conventional techniques well known in the pharmaceutical industry. Such techniques include the step of bringing into association the immune cells with the pharmaceutical carrier(s) or excipient(s), such as liquid carriers.

[0560] Aqueous suspensions may further contain substances that increase the viscosity of the suspension including, for example, sodium carboxymethylcellulose, sorbitol and/or dextran. The suspension may also contain stabilizers.

[0561] The compositions of the present disclosure may additionally contain other adjunct components conventionally found in pharmaceutical compositions. Thus, for example, the compositions may contain additional, compatible, pharmaceutically-active materials such as, for example, antipruritics, astringents, local anesthetics or anti-inflammatory agents, or may contain additional materials useful in physically formulating various dosage forms of the compositions of the present disclosure, such as dyes, preservatives, antioxidants, opacifiers, thickening agents and stabilizers. However, such materials, when added, should not unduly interfere with the biological activities of the immune cells of the compositions of the present disclosure.

[0562] The formulation or composition may also contain more than one active ingredient useful for the particular indication, disease, or condition being treated with the immune cells, where the respective activities do not adversely affect one another. Such active ingredients are suitably present in combination in amounts that are effective for the purpose intended.

[0563] Thus, in some embodiments, the pharmaceutical composition further includes other pharmaceutically active agents or drugs, such as chemotherapeutic agents.

[0564] The pharmaceutical composition in some aspects can employ time-released, delayed release, and sustained release delivery systems such that the delivery of the composition occurs prior to, and with sufficient time to cause, sensitization of the site to be treated. Many types of release delivery systems are available and known. Such systems can avoid repeated administrations of the composition, thereby increasing convenience to the subject and the physician.

[0565] Administration can be effected in one dose, continuously or intermittently throughout the course of treatment. Single or multiple administrations can be carried out with the dose level and pattern being selected by the treating physician.

[0566] The pharmaceutical composition in some embodiments contains the immune cells in amounts effective to treat or prevent a cancer, such as a therapeutically effective or prophylactically effective amount. Therapeutic or prophylactic efficacy in some embodiments is monitored by periodic assessment of treated subjects. For repeated administrations over days, weeks or months, depending on the condition, the treatment can be repeated until a desired suppression of cancer signs or symptoms occurs. However, other dosage regimens may be useful and can be determined. The desired dosage can be delivered by a single bolus administration or infusion of the composition or by multiple bolus administrations or infusions of the composition.

[0567] The cells or population of cells can be administrated in one or more doses. In some embodiments, an effective amount of cells can be administrated as a single dose. In some embodiments, an effective amount of cells can be administrated as more than one doses over a period time. Timing of administration is within the judgment of a managing physician and depends on the clinical condition of the patient.

[0568] The cells or population of cells may be obtained from any source, such as a blood bank or a donor, or the patient themselves.

[0569] An effective amount means an amount which provides a therapeutic or prophylactic benefit. The dosage administered will be dependent upon the age, health and weight of the recipient, kind of concurrent treatment, if any, frequency of treatment and the nature of the effect desired. In some embodiments, an effective amount of cells or composition comprising those cells are administrated parenterally. In some embodiments, administration can be an intravenous administration. In some embodiments, administration can be directly done by injection within a tumor.

[0570] For purposes of the disclosure, an assay, which comprises, for example, comparing the extent to which target cells are lysed or one or more cytokines are secreted by immune cells expressing the receptors, upon administration of a given dose of such immune cells to a mammal, among a set of mammals of which is each given a different dose of the immune cells, can be used to determine a starting dose to be administered to a mammal.

[0571] In some embodiments, the cells are administered as part of a combination treatment, such as simultaneously with or sequentially with, in any order, another therapeutic intervention, such as an antibody or engineered cell or receptor or agent, such as a cytotoxic or therapeutic agent. The immune cells of the disclosure are in some embodiments are co-administered with one or more additional therapeutic agents or in connection with another therapeutic intervention, either simultaneously or sequentially in any order. In some contexts, the immune cells are co-administered with another therapy sufficiently close in time such that the immune cell populations enhance the effect of one or more additional therapeutic agents, or vice versa. In some embodiments, the immune cells are administered prior to the one or more additional therapeutic agents. In some embodiments, the immune cells are administered after to the one or more additional therapeutic agents.

[0572] In embodiments, a lymphodepleting chemotherapy is administered to the subject prior to, concurrently with, or after administration (e.g., infusion) of adoptive immune cells. In an example, the lymphodepleting chemotherapy is administered to the subject prior to administration of the immune cells. For example, the lymphodepleting chemotherapy ends 1-4 days (e.g., 1, 2, 3, or 4 days) prior to adoptive cell infusion. In embodiments, multiple doses of adoptive cells are administered, e.g., as described herein. In embodiments, a lymphodepleting chemotherapy is administered to the subject prior to, concurrently with, or after administration (e.g., infusion) of the immune cells described herein. Examples of lymphodepletion include, but may not be limited to, nonmyeloablative lymphodepleting chemotherapy, myeloablative lymphodepleting chemotherapy, total body irradiation, etc. Examples of lymphodepleting agents include, but are not limited to, antithymocyte globulin, anti-CD3 antibodies, anti-CD4 antibodies, anti-CD8 antibodies, anti-CD52 antibodies, anti-CD2 antibodies, TCRαβ blockers, anti-CD20 antibodies, anti-CD19 antibodies, Bortezomib, rituximab, anti-CD 154 antibodies, rapamycin, CD3 immunotoxin, fludarabine, cyclophosphamide, busulfan, melphalan, Mabthera, Tacrolimus, alefacept, alemtuzumab, OKT3, OKT4, OKT8, OKT11, fingolimod, anti-CD40 antibodies, anti-BR3 antibodies, Campath-1H, anti-CD25 antibodies, calcineurin inhibitors, mycophenolate, and steroids, which may be used alone or in combination. As a further example, a lymphodepletion regimen can include, administration of alemtuzumab, cyclophosphamide, benduamustin, rituximab, pentostatin, and/or fludarabine. Lymphodepletion regimen can be administered in one or more cycles until the desired outcome of reduced circulating immune cells. In some embodiments, the lymphodepletion comprises administering an agent that specifically targets, and reduces or eliminates CD52+ cells in the subject, and the immune cells are modified to reduce or eliminate CD52 expression.

[0573] In some embodiments, an immune stimulating therapy is administered to the subject prior to, concurrently with, or after administration (e.g. infusion) of adoptive immune cells. In some embodiments, the immune stimulating therapy comprises homeostatic cytokines. In some embodiments, the immune stimulating therapy comprises immune-stimulatory molecules. In some embodiments, the immune stimulating therapy comprises IL-2, IL-7, IL-12, IL-15, IL-21, IL-9, or a functional fragment thereof. In some embodiments, the immune stimulating therapy comprises IL-2, IL-7, IL-12, IL-15, IL-21, IL-9, or combinations thereof. In some embodiments, the immune stimulating therapy comprises IL-2, or a functional fragment thereof.

[0574] Methods for adoptive cell therapy using autologous cells includes isolating immune cells from patient blood, performing a series of modifications on the isolated cells including transducing the cells with one or more vectors encoding the dual receptor system described herein, and administering the cells to a patient. Providing immune cells from a subject suffering from or at risk for cancer or a hematological malignancy requires isolation of immune cell from the patient's blood, and can be accomplished through methods known in the art, for example, by leukapheresis. During leukapheresis, blood from a subject is extracted and the peripheral blood mononuclear cells (PBMCs) are separated, and the remainder of the blood is returned to the subject's circulation. The PBMCs are stored either frozen or cryopreserved as a sample of immune cells and provided for further processing steps, such as, e.g. the modifications described herein.

[0575] In some embodiments, the method of treating a subject described herein comprises modifications to immune cells from the subject comprising a series of modifications comprising enrichment and/or depletion, activation, genetic modification, expansion, formulation, and cryopreservation.

[0576] The disclosure provides enrichment and/or depletion steps that can be, for example, washing and fractionating methods known in the art for preparation of subject PBMCs for downstream procedures, e.g. the modifications described herein. For example, without limitation, methods can include devices to remove gross red blood cells and platelet contaminants, systems for size-based cell fractionation for the depletion of monocytes and the isolation of lymphocytes, and/or systems that allow the enrichment of specific subsets of T cells, such as, e.g. CD4+, CD8+, CD25+, or CD62L+ T cells. Following the enrichment steps, a target sub-population of immune cells will be isolated from the subject PMBCs for further processing. Those skilled in the art will appreciate that enrichment steps, as provided herein, may also encompass any newly discovered method, device, reagent or combination thereof.

[0577] The disclosure provides activation steps that can be any method known in the art to induce activation of immune cells, e.g. T cells, required for their ex vivo expansion. Immune cell activation can be achieved, for example, by culturing the subject immune cells in the presence of dendritic cells, culturing the subject immune cells in the presence of artificial antigen-presenting cells (AAPCs), or culturing the immune cells in the presence of irradiated K562-derived AAPCs. Other methods for activating subject immune cells can be, for example, culturing the immune cells in the presence of isolated activating factors and compositions, e.g. beads, surfaces, or particles functionalized with activating factors. Activating factors can include, for example, antibodies, e.g. anti-CD3 and/or anti-CD28 antibodies. Activating factors can also be, for example, cytokines, e.g. interleukin (IL)-2 or IL-21. Activating factors can also be costimulatory molecules, such as, for example, CD40, CD40L, CD70, CD80, CD83, CD86, CD137L, ICOSL, GITRL, and CD134L. Those skilled in the art will appreciate that activating factors, as provided herein, may also encompass any newly discovered activating factor, reagent, composition, or combination thereof that can activate immune cells.

[0578] The disclosure provides genetic modification steps for modifying the subject immune cells. In some embodiments, the genetic modification comprises transducing the immune cell with a vector comprising a shRNA described herein complementary to B2M or HLA-A. In some embodiments, the genetic modification comprises modifying the genome of the immune cells to induce mutations in B2M or HLA-A using CRISPR/Cas mediated genome engineering. In some embodiments, the method comprises transducing the immune cell with one or more vectors encoding the activator and inhibitory receptors, thereby producing immune cells expressing the activator and inhibitory receptors.

[0579] The disclosure provides expansion steps for the genetically modified subject immune cells. Genetically modified subject immune cells can be expanded in any immune cell expansion system known in the art to generate therapeutic doses of immune cells for administration. For example, bioreactor bags for use in a system comprising controller pumps, and probes that allow for automatic feeding and waste removal can be used for immune cell expansion. Cell culture flasks with gas-permeable membranes at the base may be used for immune cell expansion. Any such system known in the art that enables expansion of immune cells for clinical use is encompassed by the expansion step provided herein. Immune cells are expanded in culture systems in media formulated specifically for expansion. Expansion can also be facilitated by culturing the immune cell of the disclosure in the presence of activation factors as described herein. Those skilled in the art will appreciate that expansion steps, as provided herein, may also encompass any newly discovered culture systems, media, or activating factors that can be used to expand immune cells.

[0580] The disclosure provides formulation and cryopreservation steps for the expanded genetically modified subject immune cells. Formulation steps provided include, for example, washing away excess components used in the preparation and expansion of immune cells of the methods of treatment described herein. Any pharmaceutically acceptable formulation medium or wash buffer compatible with immune cell known in the art may be used to wash, dilute/concentration immune cells, and prepare doses for administration. Formulation medium can be acceptable for administration of the immune cells, such as, for example crystalloid solutions for intravenous infusion. Cryopreservation can optionally be used to store immune cells long-term. Cryopreservation can be achieved using known methods in the art, including for example, storing cells in a cryopreservation medium containing cryopreservation components. Cryopreservation components can include, for example, dimethyl sulfoxide or glycerol. Immune cells stored in cryopreservation medium can be cryopreserved by reducing the storage temperature to −80° C. to −196° C.

[0581] In some embodiments, the method of treatment comprises determining the HLA germline type of the subject. In some embodiments, the HLA germline type is determined in bone marrow.

[0582] In some embodiments, the method of treatment comprises determining the level of expression of MSLN. In some embodiments, the level of expression of MSLN is determined in tumor tissue samples from the subject. In some embodiments, the expression level of MSLN is determined using next generation sequencing. In some embodiments, the expression level of MSLN is determined using RNA sequencing. In some embodiments, the level of MSLN is determined using immunohistochemistry.

[0583] In some embodiments, the method of treatment comprises administering a therapeutically effective dose of immune cells comprising an HLA-A*02 inhibitory receptor to a subject in need thereof, wherein the subject is determined to be HLA germline HLA-A*02 heterozygous and have cancer cells with loss of HLA-A*02. In some embodiments, the method of treatment comprises administering a therapeutically effective dose of immune cells comprising an HLA-A*01 inhibitory receptor to a subject in need thereof, wherein the subject is determined to be HLA germline HLA-A*01 heterozygous and have cancer cells with loss of HLA-A*01. In some embodiments, the method of treatment comprises administering a therapeutically effective dose of immune cells comprising an HLA-A*03 to a subject in need thereof, wherein the subject is determined to be HLA germline HLA-A*03 heterozygous and have cancer cells with loss of HLA-A*03. In some embodiments, the method of treatment comprises administering a therapeutically effective dose of immune cells comprising an HLA-A*07 inhibitory receptor to a subject in need thereof, wherein the subject is determined to be HLA germline HLA-A*07 heterozygous and have cancer cells with loss of HLA-A*07. In some embodiments, the method of treatment comprises administering a therapeutically effective dose of immune cells comprising an HLA-C*07 inhibitory receptor to a subject in need thereof, wherein the subject is determined to be HLA germline HLA-C*07 heterozygous and have cancer cells with and loss of HLA-C*07. In some embodiments, the method of treatment comprises administering a therapeutically effective dose of immune cells comprising an HLA-B*07 inhibitory receptor in a subject in need thereof, wherein the subject is determined to be HLA germline HLA-B*07 heterozygous and have cancer cells with loss of HLA-B*07.

[0584] In various embodiments, the disclosure provides method of treatment of heterozygous HLA-A*02 patients with malignancies that express MSLN and have lost HLA-A*02 expression; and/or of treatment of heterozygous HLA-A*02 adult patients with recurrent unresectable or metastatic solid tumors that express MSLN and have lost HLA-A*02 expression.

[0585] In some embodiments, a therapeutically effective dose of the immune cells described herein are administered. In some embodiments, the immune cells of the disclosure are administered by intravenous injection. In some embodiments, the immune cells of the disclosure are administered by intraperitoneal injection. In some embodiments, a therapeutically effective dose comprises about 0.5×10⁶ cells, about 1×10⁶ cells, about 2×10⁶ cells, about 3×10⁶ cells, 4×10⁶ cells, about 5×10⁶ cells, about 6×10⁶ cells, about 7×10⁶ cells, about 8×10⁶ cells, about 9×10⁶ cells, about 1×10⁷, about 2×10⁷, about 3×10⁷, about 4×10⁷, about 5×10⁷, about 6×10⁷, about 7×10⁷, about 8×10⁷, about 9×10⁷, about 1×10⁸ cells, about 2×10⁸ cells, about 3×10⁸ cells, about 4×10⁸ cells, about 5×10⁸ cells, about 6×10⁸ cells, about 7×10⁸ cells, about 8×10⁸ cells, about 9×10⁸ cells, about 1×10⁹ cells, about 2×10⁹ cells, about 3×10⁹ cells, about 3×10⁹ cells, about 4×10⁹ cells, about 5×10⁹ cells, about 5×10⁹ cells, about 6×10⁹ cells, about 7×10⁹ cells, about 8×10⁹ cells, about 9×10⁹ cells, about 1×10¹⁰ cells, about 2×10¹⁰ cells, about 3×10¹⁰ cells, about 4×10¹⁰ cells, about 5×10¹⁰ cells, about 6×10¹⁰ cells, about 7×10¹⁰ cells, about 8×10¹⁰ cells, or about 9×10¹⁰ cells.

[0586] In some embodiments, a therapeutically effective dose comprises about 0.5×10⁶ cells to about 9×10¹⁰ cells, about 1×10⁶ cells to about 5×10¹⁰ cells, about 2×10⁶ cells to about 5×10⁹ cells, about 3×10⁶ cells to about 5×10⁹ cells, about 4×10⁶ cells to about 3×10⁹ cells, about 5×10⁶ cells to about 2×10⁹ cells, about 6×10⁶ cells to about 1×10⁹ cells, 0.5×10⁶ cells to about 6×10⁹ cells, about 1×10⁶ cells to about 5×10⁹ cells, about 2×10⁶ cells to about 5×10⁹ cells, about 3×10⁶ cells to about 4×10⁹ cells, about 4×10⁶ cells to about 3×10⁹ cells, about 5×10⁶ cells to about 2×10⁹ cells, about 6×10⁶ cells to about 1×10⁹ cells, 0.5×10⁶ cells to about 6×10⁸ cells, about 1×10⁶ cells to about 5×10⁸ cells, about 2×10⁶ cells to about 5×10⁸ cells, about 3×10⁶ cells to about 4×10⁸ cells, about 4×10⁶ cells to about 3×10⁸ cells, about 5×10⁶ cells to about 2×10⁸ cells, about 6×10⁶ cells to about 1×10⁸ cells, about 7×10⁶ cells to about 9×10⁸ cells, about 8×10⁶ cells to about 8×10⁸ cells, about 9×10⁶ cells to about 7×10⁸ cells, about 1×10⁷ cells to about 6×10⁸ cells, about 2×10⁷ cells to about 5×10⁸ cells, about 7×10⁶ cells to about 9×10⁷ cells, about 8×10⁶ cells to about 8×10⁷ cells, about 9×10⁶ cells to about 7×10⁷ cells, about 1×10⁷ cells to about 6×10⁷ cells, or about 2×10⁷ cells to about 5×10⁷ cells.

[0587] In some embodiments, a therapeutically effective dose comprises about 0.5×10⁵ cells to about 9×10¹⁰ cells. In some embodiments, a therapeutically effective dose comprises about 0.5×10⁶ cells to about 1×10¹⁰ cells. In some embodiments, a therapeutically effective dose comprises about 0.5×10⁶ cells to about 5×10⁹ cells. In some embodiments, a therapeutically effective dose comprises about 0.5×10⁶ cells to about 1×10⁹ cells. In some embodiments, a therapeutically effective dose comprises about 0.5×10⁶ cells to about 6×10⁸ cells. In some embodiments, a therapeutically effective dose comprises about 0.5×10⁶ cells to about 9×10¹⁰ cells. In some embodiments, a therapeutically effective dose comprises about 0.5×10⁷ cells to about 1×10¹⁰ cells. In some embodiments, a therapeutically effective dose comprises about 0.5×10⁷ cells to about 5×10⁹ cells. In some embodiments, a therapeutically effective dose comprises about 0.5×10⁷ cells to about 1×10⁹ cells. In some embodiments, a therapeutically effective dose comprises about 0.5×10⁷ cells to about 6×10⁸ cells. In some embodiments, a therapeutically effective dose comprises about 0.5×10⁸ cells to about 9×10¹⁰ cells. In some embodiments, a therapeutically effective dose comprises about 0.5×10⁸ cells to about 1×10¹⁰ cells. In some embodiments, a therapeutically effective dose comprises about 0.5×10⁸ cells to about 5×10⁹ cells. In some embodiments, a therapeutically effective dose comprises about 0.5×10⁸ cells to about 1×10⁹ cells. The term “about” as referred to in a therapeutically dose, can be, for example, ±0.5×10⁶ cells, ±0.5×10⁷ cells, or ±0.5×10⁸ cells.

### Kits and Articles of Manufacture

[0588] The disclosure provides kits and articles of manufacture comprising the polynucleotides and vectors encoding the receptors described herein, and immune cells comprising the receptors described herein. In some embodiments, the kit comprises articles such as vials, syringes and instructions for use.

[0589] In some embodiments, the kit comprises a polynucleotide or vector comprising a sequence encoding one or more receptors of the disclosure.

[0590] In some embodiments, the kit comprises a plurality of immune cells comprising the first and second receptors as described herein. In some embodiments, the plurality of immune cells comprises a plurality of T cells.

[0591] In some embodiments, the kit further comprises instructions for use.

### ENUMERATED EMBODIMENTS

[0592] The disclosure can be understood with reference to the following illustrative, enumerated embodiments:
[0593] 1. An immune cell responsive to loss of heterozygosity in a cancer cell, comprising:
[0594] a. a first receptor, optionally a chimeric antigen receptor (CAR) or T cell receptor (TCR), comprising an extracellular ligand binding domain specific to a target antigen selected from:
   [0595] i. a cancer cell-specific antigen, or a peptide antigen thereof in a complex with a major histocompatibility complex class I (MHC-I); or
   [0596] ii. Mesothelin (MSLN), or a peptide antigen thereof in a complex with a major histocompatibility complex class I (MHC-I); and
[0597] b. a second receptor, optionally an inhibitory chimeric antigen receptor, comprising an extracellular ligand binding domain specific to a non-target antigen selected from ICAM1, COMT, and CXCL16, or a peptide antigen thereof in a complex with a major histocompatibility complex class I (MHC-I), wherein the non-target antigen comprises a polymorphism.
[0598] 2. The immune cell of embodiment 1, wherein the non-target antigen is lost from the cancer cell through loss of heterozygosity (LOH).
[0599] 3. The immune cell of embodiment 1 or 2, wherein the non-target antigen is an ICAM1 antigen that shares at least 95% identity to SEQ ID NO: 27 and the polymorphism comprises a K or E at position 469 of SEQ ID NO: 27.
[0600] 4. The immune cell of embodiment 1 or 2, wherein the non-target antigen is a COMT antigen that shares at least 95% identity to SEQ ID NO: 28 and the polymorphism comprises a V or M at position 158 of SEQ ID NO: 28.
[0601] 5. The immune cell of embodiment 1 or 2, wherein the non-target antigen is a CXCL16 antigen that shares at least 95% identity to SEQ ID NO: 29 and the polymorphism is selected from the group consisting of:
   [0602] a. an I or Tat position 142 of SEQ ID NO: 29; and
   [0603] b. an A or V at position 200 of SEQ ID NO: 29.
[0604] 6. The immune cell of any one of embodiments 1-5, wherein the non-target antigen is expressed in a non-target cell.
[0605] 7. The immune cell of any one of embodiments 1-6, wherein the non-target cell expresses both target antigen and the non-target antigen.
[0606] 8. An immune cell responsive to low or no expression of a protein in a cancer cell, comprising:
[0607] a. a first receptor, optionally a chimeric antigen receptor (CAR) or T cell receptor (TCR), comprising an extracellular ligand binding domain specific to a target antigen selected from:
   [0608] i. a cancer cell-specific antigen, or a peptide antigen thereof in a complex with a major histocompatibility complex class I (MHC-I); or
   [0609] ii. MSLN, or a peptide antigen thereof in a complex with a major histocompatibility complex class I (MHC-I); and
[0610] b. a second receptor, optionally an inhibitory chimeric antigen receptor, comprising an extracellular ligand binding domain specific to a non-target antigen selected from LRRN4 and UPK3B, or peptide antigen thereof in a complex with a major histocompatibility complex class I (MHC-I), wherein the non-target antigen is expressed at a lower level by the cancer cell than by a non-target cell.
[0611] 9. The immune cell of embodiment 8, wherein the non-target antigen is not expressed by the cancer cell.
[0612] 10. The immune cell of embodiment 9, wherein the non-target cell expresses both the target antigen and the non-target antigen.
[0613] 11. The immune cell of any one of embodiments 1-10, wherein the target antigen is a cancer cell-specific antigen.
[0614] 12. The immune cell of embodiment 11, wherein the target antigen is a peptide antigen of a cancer cell-specific antigen in a complex with a major histocompatibility complex class I (MHC-I).
[0615] 13. The immune cell of any one of embodiments 1-12, wherein the cancer cell is a mesothelioma cancer cell, an ovarian cancer cell, a cervical cancer cell, a colorectal cancer cell, an esophageal cancer cell, a head and neck cancer cell, a kidney cancer cell, an uterine cancer cell, a gastric cancer cell, a pancreatic cancer cell, a lung cancer cell, a colorectal cancer cell or a cholangiocarcinoma cell.
[0616] 14. The immune cell of any one of embodiments 1-13, wherein the cancer cell expresses MSLN.
[0617] 15. The immune cell of any one of embodiments 1-14, wherein the first receptor and the second receptor together specifically activate the immune cell in the presence of the cancer cell.
[0618] 16. The immune cell of embodiment 15, wherein the immune cell is a T cell.
[0619] 17. The immune cell of embodiment 16, wherein the T cell is a CD8+CD4− T cell.
[0620] 18. The immune cell of any one of embodiments 1-17, wherein the MSLN comprises a sequence that shares at least 95% identity to SEQ ID NO: 1 or SEQ ID NO: 2.
[0621] 19. The immune cell of any one of embodiments 1-18, wherein the first receptor is a T cell receptor (TCR).
[0622] 20. The immune cell of any one of embodiments 1-18, wherein the first receptor is a chimeric antigen receptor (CAR).
[0623] 21. The immune cell of embodiment 19 or 20, wherein the extracellular ligand binding domain of the first receptor comprises an antibody fragment, a single chain Fv antibody fragment (scFv), a β chain variable domain (Vβ), or a TCR α chain variable domain and a TCR β chain variable domain.
[0624] 22. The immune cell of embodiment 19 or 20, wherein the extracellular ligand binding domain comprises an scFv.
[0625] 23. The immune cell of embodiment 22, wherein the scFv comprises a sequence selected from the group consisting of SEQ ID NOs: 3-6, or a sequence having at least 85%, at least 90%, at least 95%, at least 97% or at least 99% identity thereto.
[0626] 24. The immune cell of embodiment 22, wherein the scFv comprises or consists essentially of a sequence selected from the group consisting of SEQ ID NOs: 3-6.
[0627] 25. An immune cell responsive to loss of heterozygosity in a cancer cell, comprising:
[0628] a. a first receptor, optionally a chimeric antigen receptor (CAR) or T cell receptor (TCR), comprising an extracellular ligand binding domain specific to Mesothelin (MSLN), or a peptide antigen thereof in a complex with a major histocompatibility complex class I (MHC-I); and
[0629] b. a second receptor, optionally an inhibitory chimeric antigen receptor, comprising an extracellular ligand binding domain specific to a non-target antigen, wherein the non-target antigen comprises HLA-A*02.
[0630] 26. The immune cell of embodiment 25, wherein the extracellular ligand binding domain of the first receptor comprises an antibody fragment, a single chain Fv antibody fragment (scFv), a β chain variable domain (Vβ), or a TCR a chain variable domain and a TCR β chain variable domain.
[0631] 27. The immune cell of embodiment 25, wherein the extracellular ligand binding domain of the first receptor comprises an scFv.
[0632] 28. The immune cell of embodiment 27, wherein the scFv comprises a sequence selected from the group consisting of SEQ ID NOs: 3-6, or a sequence having at least 85%, at least 90%, at least 95%, at least 97% or at least 99% identity thereto.
[0633] 28. The immune cell of embodiment 27, wherein the scFv comprises or consists essentially of a sequence selected from the group consisting of SEQ ID NOs: 3-6.
[0634] 29. The immune cell of any one of embodiments 25-28, wherein the extracellular ligand binding domain of the second receptor comprises an antibody fragment, a single chain Fv antibody fragment (scFv), a β chain variable domain (Vβ), or a TCR α chain variable domain and a TCR β chain variable domain.
[0635] 30. The immune cell of any one of embodiments 25-28, wherein the extracellular ligand binding domain of the second receptor comprises an scFv.
[0636] 31. The immune cell of embodiment 30, wherein the scFv comprises a sequence having at least 85%, at least 90%, at least 95%, at least 97% or at least 99% identity to any one of SEQ ID NOs: 30-41.
[0637] 32. The immune cell of embodiment 30, wherein the scFv comprises or consists essentially of a sequence of any one of SEQ ID NOs: 30-41.
[0638] 33. The immune cell of any one of embodiments 25-32, wherein the extracellular ligand binding domain of the second receptor comprises CDRs selected from the group consisting of SEQ ID NOs: 42-53.
[0639] 34. The immune cell of any one of embodiments 25-33, wherein the second receptor comprises a LILRB1 intracellular domain or a functional variant thereof
[0640] 35. The immune cell of embodiment 34, wherein the LILRB1 intracellular domain comprises a sequence at least 95% identical to SEQ ID NO: 65.
[0641] 36. The immune cell of any one of embodiments 25-35, wherein the second receptor comprises a LILRB1 transmembrane domain or a functional variant thereof
[0642] 37. The immune cell of embodiment 36, wherein the LILRB1 transmembrane domain or a functional variant thereof comprises a sequence at least 95% identical to SEQ ID NO: 74.
[0643] 38. The immune cell of any one of embodiments 25-37, wherein the second receptor comprises a LILRB1 hinge domain or functional fragment or variant thereof
[0644] 39. The immune cell of embodiment 38, wherein the LILRB1 hinge domain comprises a sequence at least 95% identical to SEQ ID NO: 73, SEQ ID NO: 66, SEQ ID NO: 67, SEQ ID NOS: 81-84, or SEQ ID NOS: 90-91.
[0645] 40. The immune cell of any one of embodiments 25-39, wherein the second receptor comprises a LILRB1 intracellular domain and a LILRB1 transmembrane domain, or a functional variant thereof
[0646] 41. The immune cell of embodiment 40, wherein the LILRB1 intracellular domain and LILRB1 transmembrane domain comprises SEQ ID NO: 69 or a sequence at least 95% identical to SEQ ID NO: 69.
[0647] 42. The immune cell of any one of embodiments 25-41, wherein the cancer cell is a mesothelioma cancer cell, an ovarian cancer cell, a cervical cancer cell, a colorectal cancer cell, an esophageal cancer cell, a head and neck cancer cell, a kidney cancer cell, an uterine cancer cell, a gastric cancer cell, a pancreatic cancer cell, a lung cancer cell, a colorectal cancer cell or a cholangiocarcinoma cell.
[0648] 43. wherein the cancer cell is a colorectal cancer cell.
[0649] 44. The immune cell of any one of embodiments 25-43, wherein the cancer expresses MSLN.
[0650] 45. The immune cell of any one of embodiments 25-44, wherein the cancer cell does not express HLA-A*02.
[0651] 46. The immune cell of any one of embodiments 25-45, wherein non-target cells express MSLN and HLA-A*02.
[0652] 47. The immune cell of any one of embodiments 25-46, wherein the first receptor and the second receptor together specifically activate the immune cell in the presence of the target cell.
[0653] 48. The immune cell of embodiment 47, wherein the immune cell is a T cell.
[0654] 49. The immune cell of embodiment 48, wherein the T cell is a CD8+CD4− T cell.
[0655] 50. The immune cell of any one of embodiments 25-49, wherein the MSLN comprises a sequence that shares at least 95% identity to SEQ ID NO: 1.
[0656] 51. The immune cell of any one of embodiments 25-50, wherein the first receptor is a chimeric antigen receptor (CAR) or a TCR.
[0657] 52. A pharmaceutical composition, comprising a therapeutically effective amount of the immune cells of any one of embodiments 1-51.
[0658] 53. The pharmaceutical composition of embodiment 52, further comprising a pharmaceutically acceptable carrier, diluent or excipient.
[0659] 54. The pharmaceutical composition of embodiment 52 or 53, for use as a medicament in the treatment of cancer.
[0660] 55. A polynucleotide system, comprising one or more polynucleotides comprising polynucleotide sequences encoding:
[0661] a. a first receptor, optionally a chimeric antigen receptor (CAR) or T cell receptor (TCR), comprising an extracellular ligand binding domain specific to a target antigen selected from:
   [0662] i. a cancer cell-specific antigen, or a peptide antigen thereof in a complex with a major histocompatibility complex class I (MHC-I); or
   [0663] ii. MSLN, or a peptide antigen thereof in a complex with a major histocompatibility complex class I (MHC-I); and
[0664] b. a second receptor, optionally an inhibitory chimeric antigen receptor, comprising an extracellular ligand binding domain specific to a non-target antigen selected from ICAM1, COMT and CXCL16, or an antigen peptide thereof in a complex with a major histocompatibility complex class I (MHC-I), wherein the non-target antigen comprises a polymorphism.
[0665] 56. A polynucleotide system, comprising one or more polynucleotides comprising polynucleotide sequences encoding:
[0666] a. a first receptor, optionally a chimeric antigen receptor (CAR) or T cell receptor (TCR), comprising an extracellular ligand binding domain specific to a target antigen selected from:
   [0667] i. a cancer cell-specific antigen, or a peptide antigen thereof in a complex with a major histocompatibility complex class I (MHC-I); or
   [0668] ii. MSLN, or a peptide antigen thereof in a complex with a major histocompatibility complex class I (MHC-I); and
[0669] b. a second receptor, optionally an inhibitory chimeric antigen receptor, comprising an extracellular ligand binding domain specific to a non-target antigen selected from LRRN4 and UPK3B, or peptide antigen thereof in a complex with a major histocompatibility complex class I (MHC-I), wherein the non-target antigen is expressed at a lower level by the cancer cell than by a non-target cell.
[0670] 57. A polynucleotide system, comprising one or more polynucleotides comprising polynucleotide sequences encoding:
[0671] a. a first receptor, optionally a chimeric antigen receptor (CAR) or T cell receptor (TCR), comprising an extracellular ligand binding domain specific to MSLN, or a peptide antigen thereof in a complex with a major histocompatibility complex class I (MHC-I); and
[0672] b. a second receptor, optionally an inhibitory chimeric antigen receptor, comprising an extracellular ligand binding domain specific to a non-target antigen, wherein the non-target antigen comprises HLA-A*02.
[0673] 58. A vector, comprising the one or more polynucleotides of any one of embodiments 55-57.
[0674] 59. A method of killing a plurality of cancer cell and/or treating cancer in a subject, comprising administering to the subject an effective amount of the immune cell of any one of embodiments 1-51 or the pharmaceutical composition of any one of embodiments 52-54.
[0675] 60. The method of embodiment 59, wherein a plurality of cancer cells express the target antigen.
[0676] 61. The method of embodiment 59 or 60, wherein a plurality of cancer cells do not express the non-target antigen.
[0677] 62. A method of making a plurality of immune cells, comprising:
[0678] a. providing a plurality of immune cells, and
[0679] b. transforming the plurality of immune cells with the polynucleotide system of any one of embodiments 55-57, or the vector of embodiment 58.
[0680] 63. A kit comprising the immune cell of any one of embodiments 1-51 or the pharmaceutical composition of any one of embodiments 52-54.
[0681] 62. The kit of embodiment 63, further comprising instructions for use.

### EXAMPLES

[0682] The following Examples are intended for illustration only and do not limit the scope of the invention. Throughout the examples, the term “blocker antigen” is used to describe embodiments of a non-target antigen.

### Example 1: Identification of Differentially Expressed Blockers

[0683] Candidate blocker targets were identified using a bioinformatics pipeline. In brief, publicly available expression databases, as described below, were searched for genes with loss of expression in tumor versus normal colon tissue. These genes were filtered for membrane proteins, and for expression in the TCGA-MESO dataset (mesothelioma). A diagram of this process is shown in FIG. 14. Candidate blocker targets are expressed in the mesothelium in healthy tissues, but are not expressed in Mesothelin (MSLN) positive cancers, which include ovarian cancers and pancreatic cancers, and approximately three-quarters of lung and colorectal cancers.

[0684] In brief, the total set of human proteins was filtered to identify predicted cell surface proteins. These proteins were examined for expression using The Cancer Genome Atlas (TCGA) database. Expression of candidate genes was examined in mesotheliomas, and genes whose expression was greater than 2 transcripts per kilobase million (TPM), or greater than 5 TPM in greater than 50% of the samples in the were included for further analysis. Expression of candidate genes in colorectal, ovarian, pancreatic and lung adenocarcinoma tumors was also evaluated, and genes whose expression in these tumor types was less than 2 TPM were included for further analysis. A summary of these genes is shown in FIG. 1. FIG. 2 shows RNA expression of MSLN in normal tissues (data from the Genotype-Tissue Expression, GTEx project, gtexportal.org/home). Mesothelin is expressed in normal adipose, fallopian tube, lung and salivary gland tissues. Thus, candidate blockers that can prevent MSLN CAR or TCR T cells from targeting these tissues should also be expressed in health tissues that express MSLN.

[0685] MSLN expression in tumor versus normal tissues was examined (FIG. 3, TCGA database). MSLN expression in a variety of cell lines was also examined (FIG. 4, Cancer Cell Line Encyclopedia, or CCLE). The cell line rank order of expression shown in FIG. 4 correlated roughly with MSLN tumor rank expression seen in FIG. 3.

[0686] LRRN4 and UPK3B were identified as a candidate blocker target. FIG. 5 shows LRRN expression in normal tissues from the GTex portal (www.gtexportal.org/home/), while FIGS. 6 and 7 show LRRN4 expression in TCGA samples, and FIG. 8 shows LRRN4 expression in CCLE cell lines. As can be seen in FIGS. 5-7, LRRN4, like MSLN, is highly expressed in adipose and lung tissues. Moreover, LRRN4 has a large extracellular domain that contains multiple leucine rich repeat (LRR) and fibronectin type-III domains (FIG. 9).

### Example 2: Identification of Candidate Blocker Targets Lost in Cancer Cells Due to Loss of Heterozygosity

[0687] Candidate blocker targets that are lost in MSLN positive cancers due to loss of heterozygosity were identified using a bioinformatics pipeline.

[0688] The following databases were used to identify candidate blocker targets: dbSNP, a database of single nucleotide polymorphisms that includes human single nucleotide variations and small-scale insertions and deletions along with publication, population frequency, molecular consequence, and genomic mapping information. Common variations were defined as having a minor allele frequency (MAF) of greater than or equal to 0.01 in at least one major population and with at least two unrelated individuals having the minor allele in NCBI. MAF of greater than or equal to 0.1 was used as the criterion for common variations. Uniprot (The Universal Protein Resource) was used as a resource for protein sequence and annotation data hosted by EMBL-EBI, SIB and PIR. GTEx (The Genotype-Tissue Expression) was used as a public resource for tissue-specific gene expression and regulation. It contains samples from 54 non-diseased tissue sites across nearly 1000 individuals. TCGA (The Cancer Genome Atlas) was used as resource for over 20,000 primary cancer and matched normal samples spanning 33 cancer types. CCLE (Cancer cell line Encyclopedia) contains information on 57 Colorectal Cancer (CRC) cell lines. Xena UCSC has renormalized TCGA and GTEx expression data (FPKM). The Broad GDAC Firehose Legacy data was used for copy number analysis.

[0689] The NCBI dbSNP database was downloaded and searched for common variants. Only variants in chromosomes identified based on a search in the Tumor Copy number portal with high loss of heterozygosity (greater than or equal to 0.5) were included, variants with a minor allele frequency of less than 0.1 were removed. VEP (Variant Effect Predictor) was used to filter for missense variants that are in protein coding regions. Genes without transmembrane domains were removed, as were genes that are not highly expressed in mesothelioma (TCGA-MESO expression level <5 TPM). Genes with an LOH frequency of less than or equal to 0.5 were removed. Genes expressed Golgi, ER, Nucleus, Cytoplasm, Mitochondrion, helical, Lysosome, and as propeptides were removed. LOH frequency was checked in the TCGA Copy Number Portal.

[0690] Genes that passed the filters were checked for other variants in Ensembl Genome Browser or VEP analysis output, as well as the locations of the variations in the gene. 11 genes passed all filters. A summary of this process is shown in FIG. 13.

[0691] Candidate blocker targets ICAM1, COMT and CXCL16 were identified. As summary of the frequency of LOH in various cancers for ICAM1, COMT and CXCL16 is shown in Table 17 below.

TABLE 17
Frequency of LOH

| | LOH Freq | | |
|---|---|---|---|
| | ICAM1 | COMT | CXCL16 |
| Ovarian (all) | 0.33 | 0.64 | 0.74 |
| Pancreatic (all) | 0.15 | 0.25 | 0.48 |
| Mesothelioma (all) | 0.09 | 0.7 | 0.21 |
| Lung (3/4) | 0.46 | 0.3 | 0.58 |
| Colorectal (3/4) | 0.12 | 0.33 | 0.58 |
| Blood cancers | | | 0.1 |
| AML | | | 0.07 |
| variant | K/E | V/M | I/T |
| MAF | 0.36 | 0.37 | 0.46 |

TABLE 18
Summary of ICAM1, COMT and CXCL16 variants

| Gene | | Protein | | |
|---|---|---|---|---|
| Name | Variant | Position | Change | MAF |
| CXCL16 | rs2277680, | 1. 200, | 1. A/V, | 1. 0.4615, |
| | rs1050998 | 2. 142 | 2. I/T | 2. 0.4633 |
| COMT | rs4680 | 158 | V/M | 0.369 |
| ICAM1 | rs5498 | 469 | K/E | 0.359 |

### Example 3: Identification of Blocker Ligand Binding Domains

[0692] Publicly available antibodies to candidate blocker antigens are sequenced, if CDR sequences are unknown. If no antibodies to candidate blocker targets are available, these antibodies are generated by immunization of mice, rats, or rabbits with purified protein (e.g., ICAM1, CXCL16, and COMT1). Sera from immunized animals is used to screen for mAbs for binding to blocker targets. Antibodies to blocker targets are also generated using the huTARG™ system. Antibodies with the desired specificity are then isolated and sequenced to determine CDR sequences.

[0693] CDR sequence from antibodies to blocker targets are used to generate scFv using standard molecular biology techniques. Candidate scFv are fused to inhibitor receptor hinge or transmembrane domains to generate inhibitory receptors using standard molecular biology techniques. Candidate scFv are also fused to activator receptor hinge or transmembrane domains (e.g., CAR) to generate full length activator receptors to use as a positive control for scFv binding to target antigens. The ability of candidate scFv to work in the context of an inhibitory receptor is assayed in Jurkat cells using the NFAT-luciferase reporter assay.

### Example 4: HLA-A *02 Blocker can Block MSLN Activator Mediated Activation of Jurkat Cells

[0694] Cell Culture

[0695] Jurkat cells encoding an NFAT Luciferase reporter were obtained from BPS Bioscience. In culture, Jurkat cells were maintained in RPMI media supplemented with 10% FBS, 1% Pen/Strep and 0.4 mg/mL G418/Geneticin. All other cell lines used in this study were obtained from ATCC, and maintained as suggested by ATCC.

[0696] Jurkat Cell Transfection

[0697] Jurkat cells were transiently transfected via 100 uL format Neon electroporation system (Thermo Fisher Scientific) according to manufacturer's protocol using the following settings: 3 pulses, 1500V, 10 msec. Cotransfection was performed with 1-3 ug of activator CAR or TCR construct and 1-3 ug of blocker constructs or empty vector per 1e6 cells and recovered in RPMI media supplemented with 20% heat-inactivated FBS and 0.1% Pen/Strep.

[0698] Jurkat-NFAT-Luciferase Activation Studies

[0699] Jurkat cells were resuspended in 15 uL of RPMI supplemented with 10% heat-inactivated FBS and 0.1% Pen/Strep, added to the peptide-loaded beads and co-cultured for 6 hours. ONE-Step Luciferase Assay System (BPS Bioscience) was used to evaluate Jurkat luminescence. Assays were performed in technical duplicates.

[0700] Primary T Cell Transduction, Expansion, and Enrichment

[0701] Frozen PBMCs were thawed in 37° C. water bath and cultured at 1e6 cells/mL in LymphoONE (Takara) with 1% human serum and activated using 1:100 of T cell TransAct (Miltenyi) supplemented with IL-15 (long/mL) and IL-21 (long/mL). After 24 hours, lentivirus was added to PBMCs at a MOI of 5. PBMCs were cultured for 2-3 additional days to allow cells to expand under TransAct stimulation. Post expansion, activator and blocker transduced primary T cells were enriched using anti-PE microbeads (Miltenyi) according to manufacturer's instructions. Briefly, primary T cells were incubated with CD19-Fc (R&D Systems) at 1:100 dilution for 30 minutes at 4° C. in MACS buffer (0.5% BSA+2 mM EDTA in PBS). Cells were washed 3 times in MACS buffer and incubated in secondary antibody (1:200) for 30 minutes at 4° C. in MACS buffer. Cells were then incubated in anti-PE microbeads and passed through the LS column (Miltenyi).

[0702] Primary T Cell In Vitro Cytotoxicity Studies

[0703] For cytotoxicity studies with pMHC targets, enriched primary T cells were incubated with SiHa or HeLa cells expressing renilla luciferase (Biosettia), and GFP or RFP. Live luciferase-expressing SiHa or HeLa cells were quantified using a Renilla Luciferase Reporter Assay System (Promega). Enriched primary T cells were incubated with SiHa or HeLa (“tumor” cells) or HLA-A*02 transduced SiHa or HeLa cells (“normal” cells). WT “tumor” SiHa or HeLa cells stably expressing GFP or RFP and renilla luciferase (Biosettia) or HLA-A*02 “normal” SiHa or HeLa cells stably expressing RFP and luciferase (Biosettia) were imaged together with unlabeled primary T cells using an IncuCyte live cell imager.

[0704] Activation of Jurkat effector cells expressing an MSLN CAR activator and a pMHC HLA-A*02 scFv LIR-1 based inhibitory receptor was assayed using the NFAT Luciferase assay.

[0705] Jurkat cells were transfected with activator:blocker DNA at a ratio of 1:4, and activation was assayed in a cell-free bead based assay (FIG. 10A). Beads were loaded with either activator antigen, or activator and blocker antigens, and the ratio of beads to Jurkat cells was varied. In the cell-free bead based assay, the pMHC HLA-A*02 scFv LIR-1 based inhibitory receptor was able to block activation of the Jurkat cells when cells were contacted with beads carrying the pMHC HLA-A*02 blocker and MSLN activator in cis. Presence of the pMHC HLA-A*02 blocker on the beads was able to shift E_{MAX} of MSLN CAR by greater than or equal to 12× (FIG. 10A).

[0706] Activation Jurkat cells transfected with the same activator and blocker at a 1:4 DNA ratio were assayed for activation using the chronic myelogenous leukemia cell line K562. K562 expresses MSLN, the activator antigen. The response of Jurkat effector cells to K562 cells transduced with HLA-A*02 to express both activator and blocker antigens (MSLN+ HLA-A*02+) and untransduced K562 (MSLN+ HLA-A*02−) that expressed the activator but not the blocker antigen was assayed. As can be seen in FIG. 10B, expression of HLA-A*02+ by the K562 cells was able to shift the MSLN CAR E_{MAX} by greater than 5×.

[0707] The ability of the pMHC HLA-A*02 inhibitory receptor to block activation via the MSNL scFv CAR was also assayed using effector primary T cells and SiHa or HeLa target cells. SiHa and HeLa cells endogenously express MSLN, and were transduced to express the HLA-A*02 inhibitory receptor target. Activation of primary effector T cells was assayed by looking at fold induction of IFNγ. As shown in FIG. 11, the pMHC HLA-A*02 LIR-1 inhibitory receptor was able to block activation of primary T cells when the primary T cells were presented with SiHa or HeLa target cells expressing HLA-A*02 (greater than 10× and 5× inhibition, respectively).

[0708] The pMHC HLA-A*02 inhibitory receptor was also able to inhibit killing by T cells expressing both the MSLN scFv CAR and the pMHC HLA-A*02 LIR-1 inhibitory receptor, when the T cells were presented with SiHa cells that expressed MSLN but not HLA-A*02 (FIG. 12).

### Example 5: HLA-A *02 Blocker Inhibits MSLN CAR Activators Directed at MSLN Using K562 and HeLa Target Cells

[0709] Cell Culture

[0710] MSLN CAR activator and HLA-A02 LIR-1 inhibitory receptor were examined, using Jurkat effector cells and K562 target cells (FIG. 15A). The ability of MSLN CART cells expressing MSLN CAR (with two different MSLN ligand binding domains) to kill HeLa cells expressing the blocker target, HLA-A*02, was also assayed (FIGS. 15B-15C). The MSLN ligand represents surface antigens that can extend into the realm of 100,000 epitopes/cell. The ratio of A to B module expression was varied using different DNA concentrations in transient transfection assays. The activator and inhibitory receptor system is flexible enough to accommodate low and high target densities, in principle allowing optimization for pMHC targets as well as non-pMHC surface antigens.

[0711] Jurkat cells encoding an NFAT luciferase reporter were obtained from BPS Bioscience. All other cell lines used in this study were obtained from ATCC. In culture, Jurkat cells were maintained in RPMI media supplemented with 10% FBS, 1% Pen/Strep and 0.4 mg/mL G418/Geneticin. K562 and HeLa cells were maintained as suggested by ATCC.

[0712] MSLN Antigen Binding Domains

[0713] MSLN-activating CAR scFv were derived from human M5 (LBD1) as described Beatty, et al. WO2015/090230A1 and humanized SS1 (LBD2) as described in BioLuminate, 2019 (BioLuminate, version 3.6, version 3.6 ed. Schrodinger, LLC, New York, N.Y.) and U.S. Pat. No. 6,809,184 B1.

[0714] Jurkat Cell Transfection and Activation

[0715] Jurkat cells were transiently transfected via 100 uL format Neon electroporation system (Thermo Fisher Scientific) according to manufacturer's protocol using the following settings: 3 pulses, 1500V, 10 msec. Co-transfection was performed with 1-3 ug of activator construct and 1-3 ug of blocker constructs or empty vector per 1e6 cells and recovered in RPMI media supplemented with 20% heat-inactivated FBS and 0.1% Pen/Strep. To confirm blocker surface expression, Jurkat cells were stained 18-24 hours post-transfection with 10 ug/mL streptavidin-PE-HLA-A*02-pMHC tetramer for 60 minutes at 4° C. in PBS with 1% BSA and characterized by flow cytometry (BD FACS Canto II). Jurkat cell activation was evaluated using the NFAT-luciferase assay system as described in Example 4.

[0716] Primary T Cell Transduction, Expansion, and Enrichment

[0717] Leukopaks were purchased from AllCells®. Collection protocols and donor informed consent were approved by an Institutional Review Board (IRB), with strict oversight. HIPAA compliance and approved protocols were also followed. Frozen PBMCs were thawed and cultured as described in Example 4. Cells were simultaneously co-transduced at a MOI=5 for each lentivirus, i.e. lentiviral vectors including activator or blocker receptor. PBMCs were cultured for 2-3 additional days to allow cells to expand under TransAct stimulation. Post expansion, activator and blocker transduced primary T cells were enriched for blocker-positive T cells by positive selection using anti-PE microbeads (Miltenyi) according to manufacturer's instructions. Briefly, primary T cells were incubated with 10 ug/mL streptavidin-PE-HLA-A*02-pMHC tetramer for 60 minutes at 4° C. in MACS buffer (0.5% BSA+2 mM EDTA in PBS). Cells were washed 3 times in MACS buffer and passed through the LS column (Miltenyi) to separate blocker-positive cells (a mix of blocker-only and activator+ blocker cells) from untransduced and activator-only cells.

[0718] Primary T Cell In Vitro Cytotoxicity Studies

[0719] For cytotoxicity studies with pMHC targets, enriched primary T cells were incubated with K562 or HeLa target cells expressing renilla luciferase (Biosettia). Target cells that were HLA-A*02 positive also expressed GFP and firefly luciferase (Biosettia), and target cells that were HLA-A*02 negative expressed RFP and firefly luciferase. Target cells were imaged together with unlabeled primary T cells using an IncuCyte live cell imager. Fluorescence intensity of live target cells over time was quantified using IncuCyte imaging software.

### Example 6: Mouse SS1 MSLN Antigen Binding Domain Activator in 2nd and 3rd Generation CAR Architectures and HLA-A *02 Blocker

[0720] Originally, humanized M5 and SS1 scFv targeting MSLN were used with a third generation CAR architecture (CD28, 4-1BB and CD3 zeta). The effect of using a murine SS1 scFv antigen binding domain, and second generation CAR architecture (4-1BB and CD3zeta intracellular domains) was assayed.

[0721] HLA-A*02− donor T cells were transduced with MSLN third generation CAR activator (a CAR with CD28, 4-1BB and CD3 zeta intracellular domains) and an HLA-A*02 scFv LIR-1 blocker using a PA2.1 antigen binding domain. MSLN CAR activators with humanized M5, humanized SS1 and murine SS1 scFv were assayed (Table 1). HLA-A*02 blocker sequences are described in Table 5. T cells were transduced with activator and/or blocker constructs, cultured, and enriched as described in Examples 4 and 5. T cells were used on day 14 following transduction, and were cultured with MSLN+ HeLa target cells at an effector: target ratio of 1:1. Cytotoxicity was assayed as described in Examples 4 and 5. FIG. 16 shows that inhibitor receptors were able to effectively block killing of HeLa cells by T cells expressing the MSLN third generation CAR when the HeLa cells also expressed HLA-A*02. Further, FIG. 16 shows that the murine SS1 generation 3 CAR (upper right plot, boxed) provides a better window than the humanized M5 and humanized SS1 CARs. Note, in FIG. 16, C-0883 is an HLA-A*02 CAR used as a positive control, additional sequences are described in Table 19.

[0722] The ability of T cells expressing the MSLN activator and HLA-A*02 LIR1 blocker to selectively kill MSLN+ HLA-A*02− Capan cells was also assayed (FIG. 17). T cells were transduced with activator and/or blocker receptor constructs, cultured, and enriched as described in Examples 4 and 5. T cells were used on day 14 following transduction, and were cultured with Capan target cells at an effector: target ratio of 1:1. Cytotoxicity was assayed as described in Examples 4 and 5. FIG. 17 shows that inhibitor receptors were able to effectively block killing of Capan cells by T cells expressing the MSLN third generation CAR when the Capan cells also expressed HLA-A*02.

[0723] The murine SS1 MSLN1 scFv was also assayed in a generation 2 CAR (a CAR with a 4-1BB and CD3 zeta intracellular domain). FIG. 18 shows that killing of MSLN+ HLA-A*02+ HeLa cells, and HCT116 wild type cells (which natively express both MSLN and HLA-A*02) by T cells expressing the mSS1 2^{nd} generation CAR was effectively blocked by HLA-A*02 scFv LIR-1 inhibitory receptor. As can be seen from FIG. 18, the 2^{nd} generation mSS1 CAR was more effectively blocked by inhibitory receptors with a PA2.1 scFv antigen binding domain than by inhibitory receptors with a BB7.2 scFv antigen binding domain. The effect of short and long LIR-1 hinge sequences in the inhibitory receptor, and the arrangement of the VH and VL domains in the HLA-A*02 scFv, was also assayed.

[0724] Expression of the 2^{nd} generation CAR with the murine SS1 scFv was also confirmed via FACS, and the results are shown in FIG. 19. The SS1 antigen binding domain was stained using a recombinant soluble MSLN ligand.

TABLE 19
Sequences of constructs

| | | Nucleotide |
|---|---|---|
| Name | Amino Acid Sequence | Sequence |
| PA2.1.14 | TEFTLTISSLQPDDFATYYCFQGSHVPRTFGQGTKV | (SEQ ID |
| (VL:VH) | EVKGGGGSGGGGSGGGGSGGQVQLVQSGAEVKKPGS | NO: 1252) |
| scFv LIRI | SVKVSOKASGYTFTSYH1HWVRQAPGQGLEWIGWIY | |
| sHTICD | PGNVNTEYNEKFKGKATITADESTNTAYMELSSLRS | |
| | EDTAVYYCAREEITYAMDYWGQGTLVTVSSVVSGPS | |
| | GGPSSPTTGPTSTSGPEDQPLTPTGSDPQSGLGRHL | |
| | GWIGILVAVILLLLLLLLLFLILRHRRQGKHWTST | |
| | QRKADFQHPAGAVGPEPTDRGLQWRSSPAADAQEEN | |
| | LYAAVKHTQPEDGVEMDTRSPHDEDPQAVTYAEVKH | |
| | SRPRREMASPPSPLSGEFLDTKDRQAEEDRQMDTEA | |
| | AASEAPQDVTYAQLHSLTLRREATEPPPSQEGPSPA | |
| | VPSIYATLAIH (SEQ ID NO: 85) | |
| PA2.1.14 | DIQMTQSPSTLSASVGDRVTITCRSSQSIVHSNGNT | (SEQ ID |
| (VL:VH) | YLEWYQQKPGKAPKLLIYKVSNRFSGVPARFSGSGS | NO: 1253) |
| scFv LIRI | GTEFTLTISSLQPDDFATYYCFQGSHVPRTFGQGTK | |
| HTICD | VEVKGGGGSGGGGSGGGGSGGQVQLVQSGAEVKKPG | |
| | SSVKVSCKASGYTFTSYHIHWVRQAPGQGLEWIGWI | |
| | YPGNVNTEYNEKFKGKATITADESTNTAYMELSSLR | |
| | SEDTAVYYCAREEITYAMDYWGQGTLVTVSSYGSQS | |
| | SKPYLLTHPSDPLELVVSGPSGGPSSPTTGPTSTSG | |
| | PEDQPLTPTGSDPQSGLGRHLGVVIGILVAVILLLL | |
| | LLLLLFLILRHRRQGKHWTSTQRKADFQHPAGAVGP | |
| | EPTDRGLQWRSSPAADAQEENLYAAVKHTQPEDGVE | |
| | MDTRSPHDEDPQAVTYAEVKHSRPRREMASPPSPLS | |
| | GEFLDTKDRQAEEDRQMDTEAAASEAPQDVTYAQLH | |
| | SLTLRREATEPPPSQEGPSPAVPSIYATLAIH | |
| | (SEQ ID NO: 86) | |
| MSLN_SsI | QVQLQQSGPELEKPGASVKISCKASGYSFTGYTMNW | (SEQ ID |
| CD8HT | VKQSHGKSLEWIGLITPYNGASSYNQKFRGKATLTV | NO: 1254) |
| 41BB CD3z | DKSSSTAYMDLLSLTSEDSAVYFCARGGYDGRGFDY | |
| | WGQGTTVTVSSGGGGSGGGGSGGGGSDIELTQSPAI | |
| | MSASPGEKVTMTCSASSSVSYMHWYQQKSGTSPKRW | |
| | IYDTSKLASGVPGRFSGSGSGNSYSLTISSVEAEDD | |
| | ATYYCQQWSGYPLTFGAGTKLEITTTPAPRPPTPAP | |
| | TIASQPLSLRPEACRPAAGGAVHTRGLDFACDIYIW | |
| | APLAGTCGVLLLSLVITLYCKRGRKKLLYIFKQPFM | |
| | RPVQTTQEEDGCSCRFPEEEEGGCELRVKFSRSADA | |
| | PAYKQGQNQLYNELNLGRREEYDVLDKRRGRDPEMG | |
| | GKPRRKNPQEGLYNELQKDKMAEAYSEIGMKGERRR | |
| | GKGHDGLYQGLSTATKDTYDALHMQALPPR (SEQ | |
| | ID NO: 87) | |
| PA2.1.14 | QVQLVQSGAEVKKPGSSVKVSCKASGYTFTSYHIHW | (SEQ ID |
| scFv LIR1 | VRQAPGQGLEWIGWIYPGNVNTEYNEKFKGKATITA | NO: 1255) |
| sHTICD | DESTNTAYMELSSLRSEDTAVYYCAREEITYAMDYW | |
| | GQGTLVTVSSGGGGSGGGGSGGGGSGGDIQMTQSPS | |
| | TLSASVGDRVTITCRSSQSIVHSNGNTYLEWYQQKP | |
| | GKAPKLLIYKVSNRFSGVPARFSGSGSGTEFTLTIS | |
| | SLQPDDFATYYCFQGSHVPRTFGQGTKVEVKVVSGP | |
| | SGGPSSPTTGPTSTSGPEDQPLTPTGSDPQSGLGRH | |
| | LGWIGILVAVILLLLLLLLLFLILRHRRQGKHWTS | |
| | TQRKADFQHPAGAVGPEPTDRGLQWRSSPAADAQEE | |
| | NLYAAVKHTQPEDGVEMDTRSPHDEDPQAVTYAEVK | |
| | HSRPRREMASPPSPLSGEFLDTKDRQAEEDRQMDTE | |
| | AAASEAPQDVTYAQLHSLTLRREATEPPPSQEGPSP | |
| | AVPSIYATLAIH (SEQ ID NO: 88) | |
| PA2.1.14 | QVQLVQSGAEVKKPGSSVKVSCKASGYTFTSYHIHW | (SEQ ID |
| scFv LIR1 | VRQAPGQGLEWIGWIYPGNVNTEYNEKFKGKATITA | NO: 258) |
| HTICD | DESTNTAYMELSSLRSEDTAVYYCAREEITYAMDYW | |
| | GQGTLVTVSSGGGGSGGGGSGGGGSGGDIQMTQSPS | |
| | TLSASVGDRVTITCRSSQSIVHSNGNTYLEWYQQKP | |
| | GKAPKLLIYKVSNRFSGVPARFSGSGSGTEFTLTIS | |
| | SLQPDDFATYYCFQGSHVPRTFGQGTKVEVKYGSQS | |
| | SKPYLLTHPSDPLELVVSGPSGGPSSPTTGPTSTSG | |
| | PEDQPLTPTGSDPQSGLGRHLGVVIGILVAVILLLL | |
| | LLLLLFLILRHRRQGKHWTSTQRKADFQHPAGAVGP | |
| | EPTDRGLQWRSSPAADAQEENLYAAVKHTQPEDGVE | |
| | MDTRSPHDEDPQAVTYAEVKHSRPRREMASPPSPLS | |
| | GEFLDTKDRQAEEDRQMDTEAAASEAPQDVTYAQLH | |
| | SLTLRREATEPPPSQEGPSPAVPSIYATLAIH | |
| | (SEQ ID NO: 89) | |

### Example 7: Assaying the Effect of the LIR-1 Hinge on Blocking Activity

[0725] The effects of different LIR-1 hinges on the ability of HLA-A*02 scFv LIR-1 inhibitory receptors to block killing by Jurkat cells expressing a KRAS TCR activator was assayed using the Jurkat NFat Luciferase assays described supra. A humanized PA2.1 scFv LIR-1 receptor and humanized BB7.2 scFv LIR-1 with a shorter LIR-1 hinge were assayed in Jurkat cells as previously described, and the results are shown in FIGS. 20A-20B. Jurkat cells were transfected with a KRAS TCR activator receptor and/or HLA-A*02 scFv LIR-1 inhibitory receptor (humanized PA2.1 or humanized BB7.2) with a variety of LIR-1 derived hinges, methods as described supra, and co-cultured with T2 target cells that were either HLA-All positive, or HA-All and HLA-A*02 positive. Inhibitory receptors with both the shorter and longer hinge behaved similarly (FIG. 20A-B). An inhibitory receptor with a mouse PA2.1 scFv and slightly longer hinges was also assayed functioned similarly to shorter LIR-1 hinges in the T2-Jurkat assay (FIG. 21A-B). Hinge sequences are shown in black in FIG. 20B and FIG. 21B, with the gray SS representing a linker between the antigen binding domain and the hinge, and the gray VIGIL the start of the LIR-1 transmembrane domain. Hinge, transmembrane domain and intracellular domain of the inhibitory receptors were all derived from LIR-1. FIGS. 20A-20B and 21A-21B show that LIR-1 hinge length can be varied without negatively effecting the LIR-1 inhibitory receptor. Shorter hinges can provide an advantage when packaging nucleic acid sequences encoding LIR-1 inhibitory receptors in lentiviral vectors for delivery.

### Example 8: Identification of New Anti-MSLN Antibodies

[0726] Mesothelin (MSLN) is a classic tumor-associated antigen that is expressed in lung cancer and many other solid tumors. However, MSLN is also expressed in normal mesothelium that surrounds and lubricates the surfaces of key internal organs. This normal expression creates significant risk of serious inflammation for MSLN-directed therapeutics. This example describes a dual-receptor (Tmod) system which exploits common LOH at the HLA locus in cancer cells, allowing T cells to recognize the difference between tumor and normal tissue. T cells engineered with the MSLN CAR Tmod construct described in this example contain: (i) a MSLN-activated CAR; and, (ii) an inhibitory receptor gated by HLA-A*02. Without wishing to be bound by theory, the Tmod system robustly protects “normal” cells even in mixed-cell populations in vitro and in a xenograft model. The MSLN CAR can also be paired with other HLA class I blockers, supporting extension of the approach to patients beyond HLA-A*02 heterozygotes. The Tmod mechanism exemplified by the MSLN CAR Tmod construct may provide an alternative route to leverage solid-tumor antigens such as MSLN in safer, more effective ways than previously possible. Mesothelin (MSLN) was proposed as a cancer target in 1992 [1], yet there is still no viable therapy that utilizes MSLN. Not only is it expressed on most mesotheliomas but also large subsets of ovarian, cervical, uterine, gastric, pancreatic and lung adenocarcinomas [2]. In normal adults, MSLN is present only in mesothelium, a tissue that itself may be nonessential [2,3]. However, immunotherapy targeting MSLN carries the risk of inflammatory attack on MSLN(+) mesothelial cells that surround important internal organs [4]. Several investigational therapeutics directed at MSLN have been tested; for example, immunotoxin-conjugates [5, 6], antibody-drug conjugates [7], bispecific antibodies [8], CAR-Ts [9], and a hybrid TCR-scFv [10]. All active systemically administered therapeutics so far have been toxic. Recently, an approach to deliver MSLN CAR-Ts via intrapleural infusion has been reported [11].

[0727] This example describes an exemplary method to treat MSLN(+) cancers that does not depend on local administration of therapeutics, but instead exploits LOH. This approach seeks to avoid systemic toxicity to normal tissues by pairing a MSLN-targeted CAR with a LIR-1-based inhibitory receptor that blocks effector function against normal cells that express the HLA-A*02 allele (FIG. 22A-22B). This dual-receptor construct is intended to treat genetically defined cancer patients who have LOH of the HLA-A*02 allele in their MSLN(+) tumor. The difference in HLA-A*02 expression in tumor vs. normal tissues caused by LOH creates an all-or-nothing input to the effector cells that is believed to confer high selectivity for tumor killing.

### Results

### Isolation and Characterization of Potent, Selective MSLN CARs

[0728] To identify potent, selective MSLN-directed ligand-binding domains (LBDs) that function in CARs, mammalian surface display libraries encoding either IgG antibodies (mAbs) or scFvs were screened (FIGS. 23A-23B). Soluble biotinylated MSLN labeled with fluorochrome were used as probe to enrich for cells in the library that stained for MSLN via FACS. As negative probe, a mixture of soluble CEA and EGFR was used to deplete cells encoding mAbs or scFvs with non-specific binding properties. After two rounds of enrichment for MSLN-binding, 62 individual LBDs were selected, converted to scFv CARs, confirmed for surface expression in Jurkat cells, and assessed for functional activity in solid-state Jurkat cell assays (FIGS. 23C-23D). This step allowed for the selection of a subset of the most sensitive, selective binders for further functional characterization.

[0729] While most of the 62 binders resulted in a functional response to cell surface displayed MSLN, six were selected for further characterization; sequences binder CDRs (heavy chain (HC) CDRs and light chain (LC) CDRs) and are provided in Table 2, Table 3 (heavy chain; VH) and Table 4 (light chain; VL). In each case, the HC-CDRs or VH may be paired with any of the LC-CDRs or VL, as the heavy chains and light chains share similarity, with routine testing to confirm desired expression and binding activity.

[0730] Single chain variable fragments (scFvs) may be generated by inserting a linker (e.g., GGGGSGGGGSGGGGSGG (SEQ ID NO: 152) or another suitable linker) between the VH and VL segments to form a VH-VL scFv; or VL-VH scFvs may alternatively be constructed. The light chains have high sequence similarity; pairing of VL and VH to generate full antibodies have been determined without undue experimentation. Illustrative scFvs are provided in Table 1, illustrative heavy and light chains are provided in Tables 3 and 4, and illustrative CDR sequences are provided in Table 2. Sequences of illustrative chimeric antigen receptors using the MSLN scFv are provided as Table 20, below.

TABLE 20
Sequences of Receptors comprising single
chain variable fragments (scFv)

| | SEQ | |
|---|---|---|
| | ID | |
| # | NO | Receptor Sequence |
| 1 | 286 | EVQLVESGGGLVKPGGSLRLSCAASGFTFSNAWMSWVRQAP |
| | | GKGLEWVGRIKSKTDGGTTDYAAPVKGRFTISRDDSKNTLYL |
| | | QMNSLKTEDTAVYYCTTDLPKLRNFHIWGQGTLVTVSSGGG |
| | | GSGGGGSGGGGSGGDIQMTQSPSSLSASVGDRVTITCRASQSI |
| | | SSYLNWYQQKPGKAPKLLIYAASSLQSGVPSRFSGSGSGTDFT |
| | | LTISSLQPEDFATYYCQQSYSTPLTFGGGTKVEIKTTTPAPRP |
| | | PTPAPTIASQPLSLRPEACRPAAGGAVHTRGLDFACDFWVLVV |
| | | VGGVLACYSLLVTVAFIIFWVRSKRSRLLHSDYMNMTPRRPGP |
| | | TRKHYQPYAPPRDFAAYRSKRGRKKLLYIFKQPFMRPVQTTQ |
| | | EEDGCSCRFPEEEEGGCELRVKFSRSADAPAYKQGQNQLYNE |
| | | LNLGRREEYDVLDKRRGRDPEMGGKPRRKNPQEGLYNELQK |
| | | DKMAEAYSEIGMKGERRRGKGHDGLYQGLSTATKDTYDALH |
| | | MQALPPR |
| 2 | 287 | EVQLVESGGGLVQPGGSLRLSCAASGFTFSSYAMHWVRQAP |
| | | GKGLEYVSAISSNGGSTYYANSVKGRFTISRDNSKNTLYLQM |
| | | GSLRAEDMAVYYCASLEYHGFRQYGLRYWHWGQGTLVTVS |
| | | SGGGGSGGGGSGGGGSGGDIQMTQSPSSLSASVGDRVTITCR |
| | | ASQSISSYLNWYQQKPGKAPKLLIYAASSLQSGVPSRFSGSGS |
| | | GTDFTLTISSLQPEDFATYYCQQSYSTPLTFGGGTKVEIKTTTP |
| | | APRPPTPAPTIASQPLSLRPEACRPAAGGAVHTRGLDFACDFW |
| | | VLVVVGGVLACYSLLVTVAFIIFWVRSKRSRLLHSDYMNMTP |
| | | RRPGPTRKHYQPYAPPRDFAAYRSKRGRKKLLYIFKQPFMRP |
| | | VQTTQEEDGCSCRFPEEEEGGCELRVKFSRSADAPAYKQGQN |
| | | QLYNELNLGRREEYDVLDKRRGRDPEMGGKPRRKNPQEGLY |
| | | NELQKDKMAEAYSEIGMKGERRRGKGHDGLYQGLSTATKDT |
| | | YDALHMQALPPR |
| 3 | 288 | QLQLQESGSGLVKPSQTLSLTCAVSGGSISSGGYSWSWIRQPP |
| | | GKGLEWIGYIYHSGSTYYNPSLKSRVTISVDRSKNQFSLKLSS |
| | | VTAADTAVYYCASIKFWFAGINYFFPWGQGTLVTVSSGGGGS |
| | | GGGGSGGGGSGGDIQMTQSPSSLSASVGDRVTITCRASQSISS |
| | | YLNWYQQKPGKAPKLLIYAASSLQSGVPSRFSGSGSGTDFTLT |
| | | ISSLQPEDFATYYCQQSYSTPLTFGGGTKVEIKTTTPAPRPPTP |
| | | APTIASQPLSLRPEACRPAAGGAVHTRGLDFACDFWVLVVVG |
| | | GVLACYSLLVTVAFIIFWVRSKRSRLLHSDYMNMTPRRPGPTR |
| | | KHYQPYAPPRDFAAYRSKRGRKKLLYIFKQPFMRPVQTTQEE |
| | | DGCSCRFPEEEEGGCELRVKFSRSADAPAYKQGQNQLYNELN |
| | | LGRREEYDVLDKRRGRDPEMGGKPRRKNPQEGLYNELQKDK |
| | | MAEAYSEIGMKGERRRGKGHDGLYQGLSTATKDTYDALHM |
| | | QALPPR |
| 4 | 289 | EVQLVESGGGLVQPGGSLRLSCAASGFTFSSYWMHWVRQAP |
| | | GKGLVWVSRINSDGSSTSYADSVKGRFTISRDNAKNTLYLQM |
| | | NSLRAEDTAVYYCASGFLGMGSNFIWGQGTLVTVSSGGGGS |
| | | GGGGSGGGGSGGDIQMTQSPSSLSASVGDRVTITCRASQSISS |
| | | YLNWYQQKPGKAPKLLIYAASSLQSGVPSRFSGSGSGTDFTLT |
| | | ISSLQPEDFATYYCQQSYSTPLTFGGGTKVEIKTTTPAPRPPTP |
| | | APTIASQPLSLRPEACRPAAGGAVHTRGLDFACDFWVLVVVG |
| | | GVLACYSLLVTVAFIIFWVRSKRSRLLHSDYMNMTPRRPGPTR |
| | | KHYQPYAPPRDFAAYRSKRGRKKLLYIFKQPFMRPVQTTQEE |
| | | DGCSCRFPEEEEGGCELRVKFSRSADAPAYKQGQNQLYNELN |
| | | LGRREEYDVLDKRRGRDPEMGGKPRRKNPQEGLYNELQKDK |
| | | MAEAYSEIGMKGERRRGKGHDGLYQGLSTATKDTYDALHM |
| | | QALPPR |
| 5 | 290 | QVQLQESGPGLVKPSQTLSLTCTVSGGSISSGGYYWSWIRQHP |
| | | GKGLEWIGYIYYSGSTYYNPSLKSLVTISVDTSKNQFSLKLS |
| | | TSVAADTAVYYCASGDRARYFDLWGRGTLVTVSSGGGGSGGG |
| | | GSGGGGSGGDIQMTQSPSSLSASVGDRVTITCRASQSISSYLN |
| | | WYQQKPGKAPKLLIYAASSLQSGVPSRFSGSGSGTDFTLTIS |
| | | SLQPEDFATYYCQQSYSTPLTFGGGTKVEIKTTTPAPRPPTP |
| | | APTIASQPLSLRPEACRPAAGGAVHTRGLDFACDFWVLVVVG |
| | | GVLACYSLLVTVAFIIFWVRSKRSRLLHSDYMNMTPRRPGPT |
| | | RKHYQPYAPPRDFAAYRSKRGRKKLLYIFKQPFMRPVQTTQE |
| | | EDGCSCRFPEEEEGGCELRVKFSRSADAPAYKQGQNQLYNEL |
| | | RNLGREEYDVLDKRRGRDPEMGGKPRRKNPQEGLYNELQKDK |
| | | MAEAYSEIGMKGERRRGKGHDGLYQGLSTATKDTYDALHMQA |
| | | LPPR |
| 6 | 291 | EVQLVESGGGLVQPGGSLRLSCAASGFTFSSYWMHWVRQAP |
| | | GKGLVWVSRINSDGSSTSYADSVKGRFTISRDNAKNTLYLQ |
| | | MNSLRAEDTAVYYCARYPRGYHQMVDAFDIWGQGTMVTVSS |
| | | GGGGSGGGGSGGGGSGGDIQMTQSPSSLSASVGDRVTITCR |
| | | ASQSISSYLNWYQQKPGKAPKLLIYAASSLQSGVPSRFSGS |
| | | GSGTDFTLTISSLQPEDFATYYCQQSYSTPLTFGGGTKVEI |
| | | KTTTPAPRPPTPAPTIASQPLSLRPEACRPAAGGAVHTRGL |
| | | DFACDFWVLVVVGGVLACYSLLVTVAFIIFWVRSKRSRLLH |
| | | SDYMNMTPRRPGPTRKHYQPYAPPRDFAAYRSKRGRKKLLY |
| | | IFKQPFMRPVQTTQEEDGCSCRFPEEEEGGCELRVKFSRSA |
| | | DAPAYKQGQNQLYNELNLGRREEYDVLDKRRGRDPEMGGKP |
| | | RRKNPQEGLYNELQKDKMAEAYSEIGMKGERRRGKGHDGLY |
| | | QGLSTATKDTYDALHMQALPPR |
| 7 | 292 | QLQLQESGPGLVKPSETLSLTCTVSGGSISSSSYYWGWIRQ |
| | | PPGKGLEWIGSIYYSGSTYYNPSLKSRVTISVDTSKNQFSL |
| | | KLSSVTAADTAVYYCARVRFLAARTTIPEANFLWGQGTLVT |
| | | VSSGGGGSGGGGSGGGGSGGDIQMTQSPSSLSASVGDRVTI |
| | | TCRASQSISSYLNWYQQKPGKAPKLLIYAASSLQSGVPSRF |
| | | SGSGSGTDFTLTISSLQPEDFATYYCQQSYSTPLTFGGGTK |
| | | VEIKTTTPAPRPPTPAPTIASQPLSLRPEACRPAAGGAVHT |
| | | RGLDFACDFWVLVVVGGVLACYSLLVTVAFIIFWVRSKRSR |
| | | LLHSDYMNMTPRRPGPTRKHYQPYAPPRDFAAYRSKRGRKK |
| | | LLYIFKQPFMRPVQTTQEEDGCSCRFPEEEEGGCELRVKFS |
| | | RSADAPAYKQGQNQLYNELNLGRREEYDVLDKRRGRDPEMG |
| | | GKPRRKNPQEGLYNELQKDKMAEAYSEIGMKGERRRGKGHD |
| | | GLYQGLSTATKDTYDALHMQALPPR |
| 8 | 293 | EVQLVESGGGLVQPGGSLRLSCAASGFTFSSYSMNWVRQAPG |
| | | KGLEWVSYISSSSSTIYYADSVKGRFTISRDNAKNSLYLQMN |
| | | SLRAEDTAVYYCARVLSRARFDYWGQGTLVTVSSGGGGSGGG |
| | | GSGGGGSGGDIQMTQSPSSLSASVGDRVTITCRASQSISSYL |
| | | NWYQQKPGKAPKLLIYAASSLQSGVPSRFSGSGSGTDFTLTI |
| | | SSLQPEDFATYYCQQSYSTPLTFGGGTKVEIKTTTPAPRPPT |
| | | PAPTIASQPLSLRPEACRPAAGGAVHTRGLDFACDFWVLVVV |
| | | GGVLACYSLLVTVAFIIFWVRSKRSRLLHSDYMNMTPRRPGP |
| | | TRKHYQPYAPPRDFAAYRSKRGRKKLLYIFKQPFMRPVQTTQ |
| | | EEDGCSCRFPEEEEGGCELRVKFSRSADAPAYKQGQNQLYNE |
| | | LNLGRREEYDVLDKRRGRDPEMGGKPRRKNPQEGLYNELQKD |
| | | KMAEAYSEIGMKGERRRGKGHDGLYQGLSTATKDTYDALHMQ |
| | | ALPPR |
| 9 | 294 | EVQLVESGGGLVKPGGSLRLSCAASGFTFSSYSMNWVRQAPG |
| | | KGLEWVSSISSSSSYIYYADSVKGRFTISRDNAKNSLYLQMN |
| | | SLRAEDTAVYYCARLRGRVFDPWGQGTLVTVSSGGGGSGGGG |
| | | SGGGGSGGDIQMTQSPSSLSASVGDRVTITCRASQSISSYLN |
| | | WYQQKPGKAPKLLIYAASSLQSGVPSRFSGSGSGTDFTLTIS |
| | | SLQPEDFATYYCQQSYSTPLTFGGGTKVEIKTTTPAPRPPTP |
| | | APTIASQPLSLRPEACRPAAGGAVHTRGLDFACDFWVLVVVG |
| | | GVLACYSLLVTVAFIIFWVRSKRSRLLHSDYMNMTPRRPGPT |
| | | RKHYQPYAPPRDFAAYRSKRGRKKLLYIFKQPFMRPVQTTQE |
| | | EDGCSCRFPEEEEGGCELRVKFSRSADAPAYKQGQNQLYNEL |
| | | NLGRREEYDVLDKRRGRDPEMGGKPRRKNPQEGLYNELQKDK |
| | | MAEAYSEIGMKGERRRGKGHDGLYQGLSTATKDTYDALHMQA |
| | | LPPR |
| 10 | 295 | QLQLQESGPGLVKPSETLSLTCTVSGGSISSSSYYWGWIRQP |
| | | PGKGLEWIGSIYYSGSTYYNPSLKSRVTISVDTSKNQFSLKL |
| | | SSVTAADTAVYYCARIKFTSFLYVHGFLWGQGTLVTVSSGGG |
| | | GSGGGGSGGGGSGGDIQMTQSPSSLSASVGDRVTITCRASQS |
| | | ISSYLNWYQQKPGKAPKLLIYAASSLQSGVPSRFSGSGSGTD |
| | | FTLTISSLQPEDFATYYCQQSYSTPLTFGGGTKVEIKTTTPA |
| | | PRPPTPAPTIASQPLSLRPEACRPAAGGAVHTRGLDFACDFW |
| | | VLVVVGGVLACYSLLVTVAFIIFWVRSKRSRLLHSDYMNMTP |
| | | RRPGPTRKHYQPYAPPRDFAAYRSKRGRKKLLYIFKQPFMRP |
| | | VQTTQEEDGCSCRFPEEEEGGCELRVKFSRSADAPAYKQGQN |
| | | QLYNELNLGRREEYDVLDKRRGRDPEMGGKPRRKNPQEGLYN |
| | | ELQKDKMAEAYSEIGMKGERRRGKGHDGLYQGLSTATKDTYD |
| | | ALHMQALPPR |
| 11 | 296 | QVQLVQSGAEVKKPGASVKVSCKASGYTFTSYAMHWVRQA |
| | | PGQRLEWMGWINAGNGNTKYSQKFQGRVTITRDTSASTAYM |
| | | ELSSLRSEDTAVYYCARGQRWLYLGGIRRHWGQGTLVTVSS |
| | | GGGGSGGGGSGGGGSGGDIQMTQSPSSLSASVGDRVTITCR |
| | | ASQSISSYLNWYQQKPGKAPKLLIYAASSLQSGVPSRFSGS |
| | | GSGTDFTLTISSLQPEDFATYYCQQSYSTPLTFGGGTKVEI |
| | | KTTTPAPRPPTPAPTIASQPLSLRPEACRPAAGGAVHTRGL |
| | | DFACDFWVLVVVGGVLACYSLLVTVAFIIFWVRSKRSRLLH |
| | | SDYMNMTPRRPGPTRKHYQPYAPPRDFAAYRSKRGRKKLLY |
| | | IFKQPFMRPVQTTQEEDGCSCRFPEEEEGGCELRVKFSRSA |
| | | DAPAYKQGQNQLYNELNLGRREEYDVLDKRRGRDPEMGGKP |
| | | RRKNPQEGLYNELQKDKMAEAYSEIGMKGERRRGKGHDGLY |
| | | DALHMQALPPR |

QGLSTATKDTY

| | | |
|---|---|---|
| 12 | 297 | QVQLQESGPGLVKPSETLSLTCTVSGGSISSYYWSWIRQPP |
| | | GKGLEWIGYIYYSGSTNYNPSLKSRVTISVDTSKNQFSLKL |
| | | SSVTAADTAVYYCAREWIPSRPYYFDYWGQGTLVTVSSGGG |
| | | GSGGGGSGGGGSGGDIQMTQSPSSLSASVGDRVTITCRASQ |
| | | SISSYLNWYQQKPGKAPKLLIYAASSLQSGVPSRFSGSGSG |
| | | TDFTLTISSLQPEDFATYYCQQSYSTPLTFGGGTKVEIKTT |
| | | TPAPRPPTPAPTIASQPLSLRPEACRPAAGGAVHTRGLDFA |
| | | CDFWVLVVVGGVLACYSLLVTVAFIIFWVRSKRSRLLHSDY |
| | | MNMTPRRPGPTRKHYQPYAPPRDFAAYRSKRGRKKLLYIFK |
| | | QPFMRPVQTTQEEDGCSCRFPEEEEGGCELRVKFSRSADAP |
| | | RREEYDVLDKRRGRDPEMGGKPRRKNPQEGLYNELQKDKM |
| | | AYKQGQNQLYNELNLGAEAYSEIGMKGERRRGKGHDGLYQ |
| | | GLSTATKDTYDALHMQALPPR |
| 13 | 298 | QVQLQESGPGLVKPSQTLSLTCTVSGGSISSGGYYWSWIR |
| | | QPPGKGLEWIGYIYYSGSTYYNPSLKSRVTISVDTSKNQF |
| | | TSLKLSSVAADTAVYYCARESTGTGAFDIWGQGTMVTVSS |
| | | GGGGSGGGGSGGGGSGGDIQMTQSPSSLSASVGDRVTITC |
| | | RASQSISSYLNWYQQKPGKAPKLLIYAASSLQSGVPSRFS |
| | | GSGSGTDFTLTISSLQPEDFATYYCQQSYSTPLTFGGGTK |
| | | VEIKTTTPAPRPPTPAPTIASQPLSLRPEACRPAAGGAVH |
| | | TRGLDFACDFWVLVVVGGVLACYSLLVTVAFIIFWVRSKR |
| | | SRLLHSDYMNMTPRRPGPTRKHYQPYAPPRDFAAYRSKRG |
| | | RKKLLYIFKQPFMRPVQTTQEEDGCSCRFPEEEEGGCELR |
| | | VKFSRSADAPAYKQGQNQLYNELNLGRREEYDVLDKRRGR |
| | | DPEMGGKPRRKNPQEGLYNELQKDKMAEAYSEIGMKGERR |
| | | RGKGHDGLYQGLSTATKDTYDALHMQALPPR |
| 14 | 299 | EVQLVESGGGVVRPGGSLRLSCAASGFTFDDYGMSWVRQAP |
| | | GKGLEWVSGINWNGGSTGYADSVKGRFTISRDNAKNSLYLQ |
| | | MNSLRAEDTALYHCARERYRRVLHWYFDLWGRGTLVTVSSG |
| | | GGGSGGGGSGGGGSGGDIQMTQSPSSLSASVGDRVTITCRA |
| | | SQSISSYLNWYQQKPGKAPKLLIYAASSLQSGVPSRFSGSG |
| | | DSGTFTLTISSLQPEDFATYYCQQSYSTPLTFGGGTKVEIK |
| | | TTTPAPRPPTPAPTIASQPLSLRPEACRPAAGGAVHTRGLD |
| | | FACDFWVLVVVGGVLACYSLLVTVAFIIFWVRSKRSRLLHS |
| | | DYMNMTPRRPGPTRKHYQPYAPPRDFAAYRSKRGRKKLLYI |
| | | FKQPFMRPVQTTQEEDGCSCRFPEEEEGGCELRVKFSRSAD |
| | | APAYKQGQNQLYNELNLGRREEYDVLDKRRGRDPEMGGKPR |
| | | RKNPQEGLYNELQKDKMAEAYSEIGMKGERRRGKGHDGLYQ |
| | | GLSTATKDTYDALHMQALPPR |
| 15 | 300 | QVQLVQSGAEVKKPGASVKVSCKASGYTFTSYDINWVRQAT |
| | | GQGLEWMGWMNPNSGNTGYAQKFQGRVTMTRNTSISTAYME |
| | | LSSLRSEDTAVYYCAREPDAFDIWGQGTMVTVSSGGGGSGG |
| | | GGSGGGGSGGDIQMTQSPSSLSASVGDRVTITCRASQSISS |
| | | YLNWYQQKPGKAPKLLIYAASSLQSGVPSRFSGSGSGTDFT |
| | | LTISSLQPEDFATYYCQQSYSTPLTFGGGTKVEIKTTTPAP |
| | | RPPTPAPTIASQPLSLRPEACRPAAGGAVHTRGLDFACDFW |
| | | VLVVVGGVLACYSLLVTVAFIIFWVRSKRSRLLHSDYMNMT |
| | | PRRPGPTRKHYQPYAPPRDFAAYRSKRGRKKLLYIFKQPFM |
| | | RPVQTTQEEDGCSCRFPEEEEGGCELRVKFSRSADAPAYKQ |
| | | GQNQLYNELNLGRREEYDVLDKRRGRDPEMGGKPRRKNPQE |
| | | GLYNELQKDKMAEAYSEIGMKGERRRGKGHDGLYQGLSTAT |
| | | KDTYDALHMQALPPR |
| 16 | 301 | QVQLQESGPGLVKPSQTLSLTCTVSGGSISSGGYYWSWIRQPP |
| | | GKGLEWIGYIYYSGSTYYNPSLKSRVTISVDTSKNQFSLKLSS |
| | | VTAADTAVYYCAREHMGTIPYYFDYWGQGTLVTVSSGGGGSGG |
| | | GGSGGGGSGGDIQMTQSPSSLSASVGDRVTITCRASQSISSYL |
| | | NWYQQKPGKAPKLLIYAASSLQSGVPSRFSGSGSGTDFTLTISS |
| | | LQPEDFATYYCQQSYSTPLTFGGGTKVEIKTTTPAPRPPTPAPT |
| | | IASQPLSLRPEACRPAAGGAVHTRGLDFACDFWVLVVVGGVL |
| | | ACYSLLVTVAFIIFWVRSKRSRLLHSDYMNMTPRRPGPTRKH |
| | | YQPYAPPRDFAAYRSKRGRKKLLYIFKQPFMRPVQTTQEEDG |
| | | CSCRFPEEEEGGCELRVKFSRSADAPAYKQGQNQLYNELNLG |
| | | RREEYDVLDKRRGRDPEMGGKPRRKNPQEGLYNELQKDKM |
| | | AEAYSEIGMKGERRRGKGHDGLYQGLSTATKDTYDALHMQA |
| | | LPPR |
| 17 | 302 | QVQLQESGPGLVKPSQTLSLTCTVSGGSISSGGYYWSWIRQPP |
| | | GKGLEWIGYIYYSGSTYYNPSLKSRVTISVDTSKNQFSLKLSSV |
| | | TAADTAVYYCAREEFGYGDVLYWGQGTLVTVSSGGGGSGG |
| | | GGSGGGGSGGDIQMTQSPSSLSASVGDRVTITCRASQSISSYLN |
| | | WYQQKPGKAPKLLIYAASSLQSGVPSRFSGSGSGTDFTLTISSL |
| | | QPEDFATYYCQQSYSTPLTFGGGTKVEIKTTTPAPRPPTPAPTI |
| | | ASQPLSLRPEACRPAAGGAVHTRGLDFACDFWVLVVVGGVL |
| | | ACYSLLVTVAFIIFWVRSKRSRLLHSDYMNMTPRRPGPTRKH |
| | | YQPYAPPRDFAAYRSKRGRKKLLYIFKQPFMRPVQTTQEEDG |
| | | CSCRFPEEEEGGCELRVKFSRSADAPAYKQGQNQLYNELNLG |
| | | RREEYDVLDKRRGRDPEMGGKPRRKNPQEGLYNELQKDKM |
| | | AEAYSEIGMKGERRRGKGHDGLYQGLSTATKDTYDALHMQA |
| | | LPPR |
| 18 | 303 | QVQLQESGPGLVKPSQTLSLTCTVSGGSISSGDYYWSWIRQPP |
| | | GKGLEWIGYIYYSGSTYYNPSLKSRVTISVDTSKNQFSLKLSSV |
| | | TAADTAVYYCAREDVVKGAFDIWGQGTMVTVSSGGGGSGG |
| | | GGSGGGGSGGDIQMTQSPSSLSASVGDRVTITCRASQSISSYLN |
| | | WYQQKPGKAPKLLIYAASSLQSGVPSRFSGSGSGTDFTLTISSL |
| | | QPEDFATYYCQQSYSTPLTFGGGTKVEIKTTTPAPRPPTPAPTI |
| | | ASQPLSLRPEACRPAAGGAVHTRGLDFACDFWVLVVVGGVL |
| | | ACYSLLVTVAFIIFWVRSKRSRLLHSDYMNMTPRRPGPTRKH |
| | | YQPYAPPRDFAAYRSKRGRKKLLYIFKQPFMRPVQTTQEEDG |
| | | CSCRFPEEEEGGCELRVKFSRSADAPAYKQGQNQLYNELNLG |
| | | RREEYDVLDKRRGRDPEMGGKPRRKNPQEGLYNELQKDKM |
| | | AEAYSEIGMKGERRRGKGHDGLYQGLSTATKDTYDALHMQA |
| | | LPPR |
| 19 | 304 | EVQLVESGGGLVQPGGSLRLSCAASGFTFSSYSMNWVRQAPG |
| | | KGLEWVSYISSSSSTIYYADSVKGRFTISRDNAKNSLYLQMNS |
| | | LRAEDTAVYYCAREDFSHKLGYFQHWGQGTLVTVSSGGGGS |
| | | GGGGSGGGGSGGDIQMTQSPSSLSASVGDRVTITCRASQSISS |
| | | YLNWYQQKPGKAPKLLIYAASSLQSGVPSRFSGSGSGTDFTLT |
| | | ISSLQPEDFATYYCQQSYSTPLTFGGGTKVEIKTTTPAPRPPTP |
| | | APTIASQPLSLRPEACRPAAGGAVHTRGLDFACDFWVLVVVG |
| | | GVLACYSLLVTVAFIIFWVRSKRSRLLHSDYMNMTPRRPGPTR |
| | | KHYQPYAPPRDFAAYRSKRGRKKLLYIFKQPFMRPVQTTQEE |
| | | DGCSCRFPEEEEGGCELRVKFSRSADAPAYKQGQNQLYNELN |
| | | LGRREEYDVLDKRRGRDPEMGGKPRRKNPQEGLYNELQKDK |
| | | MAEAYSEIGMKGERRRGKGHDGLYQGLSTATKDTYDALHM |
| | | QALPPR |
| 20 | 305 | QVQLVESGGGLVKPGGSLRLSCAASGFTFSDYYMSWIRQAPG |
| | | KGLEWVSYISSSGSTIYYADSVKGRFTISRDNAKNSLYLQMNS |
| | | LRAEDTAVYYCARDYDYVWGQGTLVTVSSGGGGSGGGGSG |
| | | GGGSGGDIQMTQSPSSLSASVGDRVTITCRASQSISSYLNWYQ |
| | | QKPGKAPKLLIYAASSLQSGVPSRFSGSGSGTDFTLTISSLQPE |
| | | DFATYYCQQSYSTPLTFGGGTKVEIKTTTPAPRPPTPAPTIASQ |
| | | PLSLRPEACRPAAGGAVHTRGLDFACDFWVLVVVGGVLACY |
| | | SLLVTVAFIIFWVRSKRSRLLHSDYMNMTPRRPGPTRKHYQPY |
| | | APPRDFAAYRSKRGRKKLLYIFKQPFMRPVQTTQEEDGCSCRF |
| | | PEEEEGGCELRVKFSRSADAPAYKQGQNQLYNELNLGRREEY |
| | | DVLDKRRGRDPEMGGKPRRKNPQEGLYNELQKDKMAEAYS |
| | | EIGMKGERRRGKGHDGLYQGLSTATKDTYDALHMQALPPR |
| 21 | 306 | QVQLQESGPGLVKPSQTLSLTCTVSGGSISSGDYYWSWIRQPP |
| | | GKGLEWIGYIYYSGSTYYNPSLKSRVTISVDTSKNQFSLKLSSV |
| | | TAADTAVYYCARDRRDWDWFDPWGQGTLVTVSSGGGGSGG |
| | | GGSGGGGSGGDIQMTQSPSSLSASVGDRVTITCRASQSISSYLN |
| | | WYQQKPGKAPKLLIYAASSLQSGVPSRFSGSGSGTDFTLTISSL |
| | | QPEDFATYYCQQSYSTPLTFGGGTKVEIKTTTPAPRPPTPAPTI |
| | | ASQPLSLRPEACRPAAGGAVHTRGLDFACDFWVLVVVGGVL |
| | | ACYSLLVTVAFIIFWVRSKRSRLLHSDYMNMTPRRPGPTRKH |
| | | YQPYAPPRDFAAYRSKRGRKKLLYIFKQPFMRPVQTTQEEDG |
| | | CSCRFPEEEEGGCELRVKFSRSADAPAYKQGQNQLYNELNLG |
| | | RREEYDVLDKRRGRDPEMGGKPRRKNPQEGLYNELQKDKM |
| | | AEAYSEIGMKGERRRGKGHDGLYQGLSTATKDTYDALHMQA |
| | | LPPR |
| 22 | 307 | QVQLQESGPGLVKPSGTLSLTCAVSGGSISSSNWWSWVRQPP |
| | | GKGLEWIGEIYHSGSTNYNPSLKSRVTISVDKSKNQFSLKLSSV |
| | | TAADTAVYYCARDQQALKYRVDWGQGTLVTVSSGGGGSGG |
| | | GGSGGGGSGGDIQMTQSPSSLSASVGDRVTITCRASQSISSYLN |
| | | WYQQKPGKAPKLLIYAASSLQSGVPSRFSGSGSGTDFTLTISSL |
| | | QPEDFATYYCQQSYSTPLTFGGGTKVEIKTTTPAPRPPTPAPTI |
| | | ASQPLSLRPEACRPAAGGAVHTRGLDFACDFWVLVVVGGVL |
| | | ACYSLLVTVAFIIFWVRSKRSRLLHSDYMNMTPRRPGPTRKH |
| | | YQPYAPPRDFAAYRSKRGRKKLLYIFKQPFMRPVQTTQEEDG |
| | | CSCRFPEEEEGGCELRVKFSRSADAPAYKQGQNQLYNELNLG |
| | | RREEYDVLDKRRGRDPEMGGKPRRKNPQEGLYNELQKDKM |
| | | AEAYSEIGMKGERRRGKGHDGLYQGLSTATKDTYDALHMQA |
| | | LPPR |
| 23 | 308 | QVQLVQSGAEVKKPGASVKVSCKASGYTFTSYGISWVRQAP |
| | | GQGLEWMGWISAYNGNTNYAQKLQGRVTMTTDTSTSTAYM |
| | | ELRSLRSDDTAVYYCARDLTLGCFDYWGQGTLVTVSSGGGG |
| | | SGGGGSGGGGSGGDIQMTQSPSSLSASVGDRVTITCRASQSISS |
| | | YLNWYQQKPGKAPKLLIYAASSLQSGVPSRFSGSGSGTDFTLT |
| | | ISSLQPEDFATYYCQQSYSTPLTFGGGTKVEIKTTTPAPRPPTP |
| | | APTIASQPLSLRPEACRPAAGGAVHTRGLDFACDFWVLVVVG |
| | | GVLACYSLLVTVAFIIFWVRSKRSRLLHSDYMNMTPRRPGPTR |
| | | KHYQPYAPPRDFAAYRSKRGRKKLLYIFKQPFMRPVQTTQEE |
| | | DGCSCRFPEEEEGGCELRVKFSRSADAPAYKQGQNQLYNELN |
| | | LGRREEYDVLDKRRGRDPEMGGKPRRKNPQEGLYNELQKDK |
| | | MAEAYSEIGMKGERRRGKGHDGLYQGLSTATKDTYDALHM |
| | | QALPPR |
| 24 | 309 | EVQLVESGGGLVQPGGSLRLSCAASGFTVSSNYMSWVRQAP |
| | | GKGLEWVSVIYSGGSTYYADSVKGRFTISRDNSKNTLYLQMN |
| | | SLRAEDTAVYYCARDGSNSWYFDLWGRGTLVTVSSGGGGSG |
| | | GGGSGGGGSGGDIQMTQSPSSLSASVGDRVTITCRASQSISSYL |
| | | NWYQQKPGKAPKLLIYAASSLQSGVPSRFSGSGSGTDFTLTISS |
| | | LQPEDFATYYCQQSYSTPLTFGGGTKVEIKTTTPAPRPPTPAPT |
| | | IASQPLSLRPEACRPAAGGAVHTRGLDFACDFWVLVVVGGVL |
| | | ACYSLLVTVAFIIFWVRSKRSRLLHSDYMNMTPRRPGPTRKH |
| | | YQPYAPPRDFAAYRSKRGRKKLLYIFKQPFMRPVQTTQEEDG |
| | | CSCRFPEEEEGGCELRVKFSRSADAPAYKQGQNQLYNELNLG |
| | | RREEYDVLDKRRGRDPEMGGKPRRKNPQEGLYNELQKDKM |
| | | AEAYSEIGMKGERRRGKGHDGLYQGLSTATKDTYDALHMQA |
| | | LPPR |
| 25 | 310 | QVQLVESGGGVVQPGRSLRLSCAASGFTFSSYGMHWVRQAP |
| | | GKGLEWVAVIWYDGSNKYYADSVKGRFTISRDNSKNTLYLQ |
| | | MNSLRAEDTAVYYCARAFLFLSFSVWGQGTLVTVSSGGGGS |
| | | GGGGSGGGGSGGDIQMTQSPSSLSASVGDRVTITCRASQSISS |
| | | YLNWYQQKPGKAPKLLIYAASSLQSGVPSRFSGSGSGTDFTLT |
| | | ISSLQPEDFATYYCQQSYSTPLTFGGGTKVEIKTTTPAPRPPTP |
| | | APTIASQPLSLRPEACRPAAGGAVHTRGLDFACDFWVLVVVG |
| | | GVLACYSLLVTVAFIIFWVRSKRSRLLHSDYMNMTPRRPGPTR |
| | | KHYQPYAPPRDFAAYRSKRGRKKLLYIFKQPFMRPVQTTQEE |
| | | DGCSCRFPEEEEGGCELRVKFSRSADAPAYKQGQNQLYNELN |
| | | LGRREEYDVLDKRRGRDPEMGGKPRRKNPQEGLYNELQKDK |
| | | MAEAYSEIGMKGERRRGKGHDGLYQGLSTATKDTYDALHM |
| | | QALPPR |
| 26 | 311 | EVQLVESGGVVVQPGGSLRLSCAASGFTFDDYTMHWVRQAP |
| | | GKGLEWVSLISWDGGSTYYADSVKGRFTISRDNSKNSLYLQM |
| | | NSLRTEDTALYYCAKGIFYSSKEDFDYWGQGTLVTVSSGGGG |
| | | SGGGGSGGGGSGGDIQMTQSPSSLSASVGDRVTITCRASQSISS |
| | | YLNWYQQKPGKAPKLLIYAASSLQSGVPSRFSGSGSGTDFTLT |
| | | ISSLQPEDFATYYCQQSYSTPLTFGGGTKVEIKTTTPAPRPPTP |
| | | APTIASQPLSLRPEACRPAAGGAVHTRGLDFACDFWVLVVVG |
| | | GVLACYSLLVTVAFIIFWVRSKRSRLLHSDYMNMTPRRPGPTR |
| | | KHYQPYAPPRDFAAYRSKRGRKKLLYIFKQPFMRPVQTTQEE |
| | | DGCSCRFPEEEEGGCELRVKFSRSADAPAYKQGQNQLYNELN |
| | | LGRREEYDVLDKRRGRDPEMGGKPRRKNPQEGLYNELQKDK |
| | | MAEAYSEIGMKGERRRGKGHDGLYQGLSTATKDTYDALHM |
| | | QALPPR |
| 27 | 312 | EVQLVESGGVVVQPGGSLRLSCAASGFTFDDYTMHWVRQAP |
| | | GKGLEWVSLISWDGGSTYYADSVKGRFTISRDNSKNSLYLQM |
| | | NSLRTEDTALYYCAKDIWIFYSSNPKPTVYWGQGTLVTVSSG |
| | | GGGSGGGGSGGGGSGGDIQMTQSPSSLSASVGDRVTITCRAS |
| | | QSISSYLNWYQQKPGKAPKLLIYAASSLQSGVPSRFSGSGSGT |
| | | DFTLTISSLQPEDFATYYCQQSYSTPLTFGGGTKVEIKTTTPAP |
| | | RPPTPAPTIASQPLSLRPEACRPAAGGAVHTRGLDFACDFWVL |
| | | VVVGGVLACYSLLVTVAFIIFWVRSKRSRLLHSDYMNMTPRR |
| | | PGPTRKHYQPYAPPRDFAAYRSKRGRKKLLYIFKQPFMRPVQ |
| | | TTQEEDGCSCRFPEEEEGGCELRVKFSRSADAPAYKQGQNQL |
| | | YNELNLGRREEYDVLDKRRGRDPEMGGKPRRKNPQEGLYNE |
| | | LQKDKMAEAYSEIGMKGERRRGKGHDGLYQGLSTATKDTYD |
| | | ALHMQALPPR |
| 28 | 313 | QVQLVQSGSELKKPGASVKVSCKASGYTFTSYAMNWVRQAP |
| | | GQGLEWMGWINTNTGNPTYAQGFTGRFVFSFDTSVSTAYLQI |
| | | CSLKAEDTAVYYCARKDQTLTYGNWFDPWGQGTLVTVSSGG |
| | | GGSGGGGSGGGGSGGDIQMTQSPSSLSASVGDRVTITCRASQS |
| | | ISSYLNWYQQKPGKAPKLLIYAASSLQSGVPSRFSGSGSGTDF |
| | | TLTISSLQPEDFATYYCQQSYSTPLTFGGGTKVEIKTTTPAPRPP |
| | | TPAPTIASQPLSLRPEACRPAAGGAVHTRGLDFACDFWVLVV |
| | | VGGVLACYSLLVTVAFIIFWVRSKRSRLLHSDYMNMTPRRPG |
| | | PTRKHYQPYAPPRDFAAYRSKRGRKKLLYIFKQPFMRPVQTT |
| | | QEEDGCSCRFPEEEEGGCELRVKFSRSADAPAYKQGQNQLYN |
| | | ELNLGRREEYDVLDKRRGRDPEMGGKPRRKNPQEGLYNELQ |
| | | KDKMAEAYSEIGMKGERRRGKGHDGLYQGLSTATKDTYDAL |
| | | HMQALPPR |
| 29 | 314 | QVQLQESGPGLVKPSETLSLTCTVSGGSVSSGSYYWSWIRQPP |
| | | GKGLEWIGYIYYSGSTNYNPSLKSRVTISVDTSKNQFSLKLSSV |
| | | TAADTAVYYCARDHYERGLYWGQGTLVTVSSGGGGSGGGG |
| | | SGGGGSGGDIQMTQSPSSLSASVGDRVTITCRASQSISSYLNW |
| | | YQQKPGKAPKLLIYAASSLQSGVPSRFSGSGSGTDFTLTISSLQ |
| | | PEDFATYYCQQSYSTPLTFGGGTKVEIKTTTPAPRPPTPAPTIA |
| | | SQPLSLRPEACRPAAGGAVHTRGLDFACDFWVLVVVGGVLA |
| | | CYSLLVTVAFIIFWVRSKRSRLLHSDYMNMTPRRPGPTRKHY |
| | | QPYAPPRDFAAYRSKRGRKKLLYIFKQPFMRPVQTTQEEDGC |
| | | SCRFPEEEEGGCELRVKFSRSADAPAYKQGQNQLYNELNLGR |
| | | REEYDVLDKRRGRDPEMGGKPRRKNPQEGLYNELQKDKMA |
| | | EAYSEIGMKGERRRGKGHDGLYQGLSTATKDTYDALHMQAL |
| | | PPR |
| 30 | 315 | QVQLVESGGGLVKPGGSLRLSCAASGFTFSDYYMSWIRQAPG |
| | | KGLEWVSYISSSGSTIYYADSVKGRFTISRDNAKNSLYLQMNS |
| | | LRAEDTAVYYCARYMYNWYFDLWGRGTLVTVSSGGGGSGG |
| | | GGSGGGGSGGDIQMTQSPSSVSASVGDRVTITCRASQGISSWL |
| | | AWYQQKPGKAPKLLIYAASSLQSGVPSRFSGSGSGTDFTLTISS |
| | | LQPEDFATYYCQQANSFPLTFGGGTKVEIKTTTPAPRPPTPAPT |
| | | IASQPLSLRPEACRPAAGGAVHTRGLDFACDFWVLVVVGGVL |
| | | ACYSLLVTVAFIIFWVRSKRSRLLHSDYMNMTPRRPGPTRKH |
| | | YQPYAPPRDFAAYRSKRGRKKLLYIFKQPFMRPVQTTQEEDG |
| | | CSCRFPEEEEGGCELRVKFSRSADAPAYKQGQNQLYNELNLG |
| | | RREEYDVLDKRRGRDPEMGGKPRRKNPQEGLYNELQKDKM |
| | | AEAYSEIGMKGERRRGKGHDGLYQGLSTATKDTYDALHMQA |
| | | LPPR |
| 31 | 316 | QVQLVESGGGLVKPGGSLRLSCAASGFTFSDYYMSWIRQAPG |
| | | KGLEWVSYISSSGSTIYYADSVKGRFTISRDNAKNSLYLQMNS |
| | | LRAEDTAVYYCARDRRPAFDIWGQGTMVTVSSGGGGSGGGG |
| | | SGGGGSGGDIQMTQSPSSVSASVGDRVTITCRASQGISSWLAW |
| | | YQQKPGKAPKLLIYAASSLQSGVPSRFSGSGSGTDFTLTISSLQ |
| | | PEDFATYYCQQANSFPLTFGGGTKVEIKTTTPAPRPPTPAPTIA |
| | | SQPLSLRPEACRPAAGGAVHTRGLDFACDFWVLVVVGGVLA |
| | | CYSLLVTVAFIIFWVRSKRSRLLHSDYMNMTPRRPGPTRKHY |
| | | QPYAPPRDFAAYRSKRGRKKLLYIFKQPFMRPVQTTQEEDGC |
| | | SCRFPEEEEGGCELRVKFSRSADAPAYKQGQNQLYNELNLGR |
| | | REEYDVLDKRRGRDPEMGGKPRRKNPQEGLYNELQKDKMA |
| | | EAYSEIGMKGERRRGKGHDGLYQGLSTATKDTYDALHMQAL |
| | | PPR |
| 32 | 317 | QVQLVESGGGLVKPGGSLRLSCAASGFTFSDYYMSWIRQAPG |
| | | KGLEWVSYISSSGSTIYYADSVKGRFTISRDNAKNSLYLQMNS |
| | | LRAEDTAVYYCAVHLKRRPYFDYWGQGTLVTVSSGGGGSGG |
| | | GGSGGGGSGGAIQLTQSPSSLSASVGDRVTITCRASQGISSALA |
| | | WYQQKPGKAPKLLIYDASSLESGVPSRFSGSGSGTDFTLTISSL |
| | | QPEDFATYYCQQFNSYPLTFGGGTKVEIKTTTPAPRPPTPAPTI |
| | | ASQPLSLRPEACRPAAGGAVHTRGLDFACDFWVLVVVGGVL |
| | | ACYSLLVTVAFIIFWVRSKRSRLLHSDYMNMTPRRPGPTRKH |
| | | YQPYAPPRDFAAYRSKRGRKKLLYIFKQPFMRPVQTTQEEDG |
| | | CSCRFPEEEEGGCELRVKFSRSADAPAYKQGQNQLYNELNLG |
| | | RREEYDVLDKRRGRDPEMGGKPRRKNPQEGLYNELQKDKM |
| | | AEAYSEIGMKGERRRGKGHDGLYQGLSTATKDTYDALHMQA |
| | | LPPR |
| 33 | 318 | QVQLVESGGGLVKPGGSLRLSCAASGFTFSDYYMSWIRQAPG |
| | | KGLEWVSYISSSGSTIYYADSVKGRFTISRDNAKNSLYLQMNS |
| | | LRAEDTAVYYCASVHKKPIFDYWGQGTLVTVSSGGGGSGGG |
| | | GSGGGGSGGAIQLTQSPSSLSASVGDRVTITCRASQGISSALA |
| | | WYQQKPGKAPKLLIYDASSLESGVPSRFSGSGSGTDFTLTISSL |
| | | QPEDFATYYCQQFNSYPLTFGGGTKVEIKTTTPAPRPPTPAPTI |
| | | ASQPLSLRPEACRPAAGGAVHTRGLDFACDFWVLVVVGGVL |
| | | ACYSLLVTVAFIIFWVRSKRSRLLHSDYMNMTPRRPGPTRKH |
| | | YQPYAPPRDFAAYRSKRGRKKLLYIFKQPFMRPVQTTQEEDG |
| | | CSCRFPEEEEGGCELRVKFSRSADAPAYKQGQNQLYNELNLG |
| | | RREEYDVLDKRRGRDPEMGGKPRRKNPQEGLYNELQKDKM |
| | | AEAYSEIGMKGERRRGKGHDGLYQGLSTATKDTYDALHMQA |
| | | LPPR |
| 34 | 319 | QVQLVESGGGLVKPGGSLRLSCAASGFTFSDYYMSWIRQAPG |
| | | KGLEWVSYISSSGSTIYYADSVKGRFTISRDNAKNSLYLQMNS |
| | | LRAEDTAVYYCASTSRRCTFQHWGQGTLVTVSSGGGGSGGG |
| | | GSGGGGSGGAIQLTQSPSSLSASVGDRVTITCRASQGISSALA |
| | | WYQQKPGKAPKLLIYDASSLESGVPSRFSGSGSGTDFTLTISSL |
| | | QPEDFATYYCQQFNSYPLTFGGGTKVEIKTTTPAPRPPTPAPTI |
| | | ASQPLSLRPEACRPAAGGAVHTRGLDFACDFWVLVVVGGVL |
| | | ACYSLLVTVAFIIFWVRSKRSRLLHSDYMNMTPRRPGPTRKH |
| | | YQPYAPPRDFAAYRSKRGRKKLLYIFKQPFMRPVQTTQEEDG |
| | | CSCRFPEEEEGGCELRVKFSRSADAPAYKQGQNQLYNELNLG |
| | | RREEYDVLDKRRGRDPEMGGKPRRKNPQEGLYNELQKDKM |
| | | AEAYSEIGMKGERRRGKGHDGLYQGLSTATKDTYDALHMQA |
| | | LPPR |
| 35 | 320 | QVQLVESGGGLVKPGGSLRLSCAASGFTFSDYYMSWIRQAPG |
| | | KGLEWVSYISSSGSTIYYADSVKGRFTISRDNAKNSLYLQMNS |
| | | LRAEDTAVYYCASTSPRPLFQHWGQGTLVTVSSGGGGSGGG |
| | | GSGGGGSGGAIQLTQSPSSLSASVGDRVTITCRASQGISSALA |
| | | WYQQKPGKAPKLLIYDASSLESGVPSRFSGSGSGTDFTLTISSL |
| | | QPEDFATYYCQQFNSYPLTFGGGTKVEIKTTTPAPRPPTPAPTI |
| | | ASQPLSLRPEACRPAAGGAVHTRGLDFACDFWVLVVVGGVL |
| | | ACYSLLVTVAFIIFWVRSKRSRLLHSDYMNMTPRRPGPTRKH |
| | | YQPYAPPRDFAAYRSKRGRKKLLYIFKQPFMRPVQTTQEEDG |
| | | CSCRFPEEEEGGCELRVKFSRSADAPAYKQGQNQLYNELNLG |
| | | RREEYDVLDKRRGRDPEMGGKPRRKNPQEGLYNELQKDKM |
| | | AEAYSEIGMKGERRRGKGHDGLYQGLSTATKDTYDALHMQA |
| | | LPPR |
| 36 | 321 | QVQLVESGGGLVKPGGSLRLSCAASGFTFSDYYMSWIRQAPG |
| | | KGLEWVSYISSSGSTIYYADSVKGRFTISRDNAKNSLYLQMNS |
| | | LRAEDTAVYYCASPYQVRGVYFDYWGQGTLVTVSSGGGGSG |
| | | GGGSGGGGSGGAIQLTQSPSSLSASVGDRVTITCRASQGISSAL |
| | | AWYQQKPGKAPKLLIYDASSLESGVPSRFSGSGSGTDFTLTISS |
| | | LQPEDFATYYCQQFNSYPLTFGGGTKVEIKTTTPAPRPPTPAPT |
| | | IASQPLSLRPEACRPAAGGAVHTRGLDFACDFWVLVVVGGVL |
| | | ACYSLLVTVAFIIFWVRSKRSRLLHSDYMNMTPRRPGPTRKH |
| | | YQPYAPPRDFAAYRSKRGRKKLLYIFKQPFMRPVQTTQEEDG |
| | | CSCRFPEEEEGGCELRVKFSRSADAPAYKQGQNQLYNELNLG |
| | | RREEYDVLDKRRGRDPEMGGKPRRKNPQEGLYNELQKDKM |
| | | AEAYSEIGMKGERRRGKGHDGLYQGLSTATKDTYDALHMQA |
| | | LPPR |
| 37 | 322 | QVQLVESGGGLVKPGGSLRLSCAASGFTFSDYYMSWIRQAPG |
| | | KGLEWVSYISSSGSTIYYADSVKGRFTISRDNAKNSLYLQMNS |
| | | LRAEDTAVYYCASPYKKRRTVFDYWGQGTLVTVSSGGGGSG |
| | | GGGSGGGGSGGAIQLTQSPSSLSASVGDRVTITCRASQGISSAL |
| | | AWYQQKPGKAPKLLIYDASSLESGVPSRFSGSGSGTDFTLTISS |
| | | LQPEDFATYYCQQFNSYPLTFGGGTKVEIKTTTPAPRPPTPAPT |
| | | IASQPLSLRPEACRPAAGGAVHTRGLDFACDFWVLVVVGGVL |
| | | ACYSLLVTVAFIIFWVRSKRSRLLHSDYMNMTPRRPGPTRKH |
| | | YQPYAPPRDFAAYRSKRGRKKLLYIFKQPFMRPVQTTQEEDG |
| | | CSCRFPEEEEGGCELRVKFSRSADAPAYKQGQNQLYNELNLG |
| | | RREEYDVLDKRRGRDPEMGGKPRRKNPQEGLYNELQKDKM |
| | | AEAYSEIGMKGERRRGKGHDGLYQGLSTATKDTYDALHMQA |
| | | LPPR |
| 38 | 323 | QVQLVESGGGLVKPGGSLRLSCAASGFTFSDYYMSWIRQAPG |
| | | KGLEWVSYISSSGSTIYYADSVKGRFTISRDNAKNSLYLQMNS |
| | | LRAEDTAVYYCASLQRGLALFQHWGQGTLVTVSSGGGGSGG |
| | | GGSGGGGSGGAIQLTQSPSSLSASVGDRVTITCRASQGISSALA |
| | | WYQQKPGKAPKLLIYDASSLESGVPSRFSGSGSGTDFTLTISSL |
| | | QPEDFATYYCQQFNSYPLTFGGGTKVEIKTTTPAPRPPTPAPTI |
| | | ASQPLSLRPEACRPAAGGAVHTRGLDFACDFWVLVVVGGVL |
| | | ACYSLLVTVAFIIFWVRSKRSRLLHSDYMNMTPRRPGPTRKH |
| | | YQPYAPPRDFAAYRSKRGRKKLLYIFKQPFMRPVQTTQEEDG |
| | | CSCRFPEEEEGGCELRVKFSRSADAPAYKQGQNQLYNELNLG |
| | | RREEYDVLDKRRGRDPEMGGKPRRKNPQEGLYNELQKDKM |
| | | AEAYSEIGMKGERRRGKGHDGLYQGLSTATKDTYDALHMQA |
| | | LPPR |
| 39 | 324 | QVQLVESGGGLVKPGGSLRLSCAASGFTFSDYYMSWIRQAPG |
| | | KGLEWVSYISSSGSTIYYADSVKGRFTISRDNAKNSLYLQMNS |
| | | LRAEDTAVYYCASILSVPYFDLWGRGTLVTVSSGGGGSGGGG |
| | | SGGGGSGGAIQLTQSPSSLSASVGDRVTITCRASQGISSALAW |
| | | YQQKPGKAPKLLIYDASSLESGVPSRFSGSGSGTDFTLTISSLQ |
| | | PEDFATYYCQQFNSYPLTFGGGTKVEIKTTTPAPRPPTPAPTIA |
| | | SQPLSLRPEACRPAAGGAVHTRGLDFACDFWVLVVVGGVLA |
| | | CYSLLVTVAFIIFWVRSKRSRLLHSDYMNMTPRRPGPTRKHY |
| | | QPYAPPRDFAAYRSKRGRKKLLYIFKQPFMRPVQTTQEEDGC |
| | | SCRFPEEEEGGCELRVKFSRSADAPAYKQGQNQLYNELNLGR |
| | | REEYDVLDKRRGRDPEMGGKPRRKNPQEGLYNELQKDKMA |
| | | EAYSEIGMKGERRRGKGHDGLYQGLSTATKDTYDALHMQAL |
| | | PPR |
| 40 | 325 | QVQLVESGGGLVKPGGSLRLSCAASGFTFSDYYMSWIRQAPG |
| | | KGLEWVSYISSSGSTIYYADSVKGRFTISRDNAKNSLYLQMNS |
| | | LRAEDTAVYYCASGWIRVPLRLPLFQHWGQGTLVTVSSGGG |
| | | GSGGGGSGGGGSGGAIQLTQSPSSLSASVGDRVTITCRASQGIS |
| | | SALAWYQQKPGKAPKLLIYDASSLESGVPSRFSGSGSGTDFTL |
| | | TISSLQPEDFATYYCQQFNSYPLTFGGGTKVEIKTTTPAPRPPT |
| | | PAPTIASQPLSLRPEACRPAAGGAVHTRGLDFACDFWVLVVV |
| | | GGVLACYSLLVTVAFIIFWVRSKRSRLLHSDYMNMTPRRPGP |
| | | TRKHYQPYAPPRDFAAYRSKRGRKKLLYIFKQPFMRPVQTTQ |
| | | EEDGCSCRFPEEEEGGCELRVKFSRSADAPAYKQGQNQLYNE |
| | | LNLGRREEYDVLDKRRGRDPEMGGKPRRKNPQEGLYNELQK |
| | | DKMAEAYSEIGMKGERRRGKGHDGLYQGLSTATKDTYDALH |
| | | MQALPPR |
| 41 | 326 | QVQLVESGGGLVKPGGSLRLSCAASGFTFSDYYMSWIRQAPG |
| | | KGLEWVSYISSSGSTIYYADSVKGRFTISRDNAKNSLYLQMNS |
| | | LRAEDTAVYYCARVTIFAIFDIWGQGTMVTVSSGGGGSGGGG |
| | | SGGGGSGGAIQLTQSPSSLSASVGDRVTITCRASQGISSALAW |
| | | YQQKPGKAPKLLIYDASSLESGVPSRFSGSGSGTDFTLTISSLQ |
| | | PEDFATYYCQQFNSYPLTFGGGTKVEIKTTTPAPRPPTPAPTIA |
| | | SQPLSLRPEACRPAAGGAVHTRGLDFACDFWVLVVVGGVLA |
| | | CYSLLVTVAFIIFWVRSKRSRLLHSDYMNMTPRRPGPTRKHY |
| | | QPYAPPRDFAAYRSKRGRKKLLYIFKQPFMRPVQTTQEEDGC |
| | | SCRFPEEEEGGCELRVKFSRSADAPAYKQGQNQLYNELNLGR |
| | | REEYDVLDKRRGRDPEMGGKPRRKNPQEGLYNELQKDKMA |
| | | EAYSEIGMKGERRRGKGHDGLYQGLSTATKDTYDALHMQAL |
| | | PPR |
| 42 | 327 | QVQLVESGGGLVKPGGSLRLSCAASGFTFSDYYMSWIRQAPG |
| | | KGLEWVSYISSSGSTIYYADSVKGRFTISRDNAKNSLYLQMNS |
| | | LRAEDTAVYYCARVGRGFVHFDLWGRGTLVTVSSGGGGSGG |
| | | GGSGGGGSGGAIQLTQSPSSLSASVGDRVTITCRASQGISSALA |
| | | WYQQKPGKAPKLLIYDASSLESGVPSRFSGSGSGTDFTLTISSL |
| | | QPEDFATYYCQQFNSYPLTFGGGTKVEIKTTTPAPRPPTPAPTI |
| | | ASQPLSLRPEACRPAAGGAVHTRGLDFACDFWVLVVVGGVL |
| | | ACYSLLVTVAFIIFWVRSKRSRLLHSDYMNMTPRRPGPTRKH |
| | | YQPYAPPRDFAAYRSKRGRKKLLYIFKQPFMRPVQTTQEEDG |
| | | CSCRFPEEEEGGCELRVKFSRSADAPAYKQGQNQLYNELNLG |
| | | RREEYDVLDKRRGRDPEMGGKPRRKNPQEGLYNELQKDKM |
| | | AEAYSEIGMKGERRRGKGHDGLYQGLSTATKDTYDALHMQA |
| | | LPPR |
| 43 | 328 | QVQLVESGGGLVKPGGSLRLSCAASGFTFSDYYMSWIRQAPG |
| | | KGLEWVSYISSSGSTIYYADSVKGRFTISRDNAKNSLYLQMNS |
| | | LRAEDTAVYYCARTSRGLCVLFDYWGQGTLVTVSSGGGGSG |
| | | GGGSGGGGSGGAIQLTQSPSSLSASVGDRVTITCRASQGISSAL |
| | | AWYQQKPGKAPKLLIYDASSLESGVPSRFSGSGSGTDFTLTISS |
| | | LQPEDFATYYCQQFNSYPLTFGGGTKVEIKTTTPAPRPPTPAPT |
| | | IASQPLSLRPEACRPAAGGAVHTRGLDFACDFWVLVVVGGVL |
| | | ACYSLLVTVAFIIFWVRSKRSRLLHSDYMNMTPRRPGPTRKH |
| | | YQPYAPPRDFAAYRSKRGRKKLLYIFKQPFMRPVQTTQEEDG |
| | | CSCRFPEEEEGGCELRVKFSRSADAPAYKQGQNQLYNELNLG |
| | | RREEYDVLDKRRGRDPEMGGKPRRKNPQEGLYNELQKDKM |
| | | AEAYSEIGMKGERRRGKGHDGLYQGLSTATKDTYDALHMQA |
| | | LPPR |
| 44 | 329 | QVQLVESGGGLVKPGGSLRLSCAASGFTFSDYYMSWIRQAPG |
| | | KGLEWVSYISSSGSTIYYADSVKGRFTISRDNAKNSLYLQMNS |
| | | LRAEDTAVYYCARSGPSSYWYFDLWGRGTLVTVSSGGGGSG |
| | | GGGSGGGGSGGAIQLTQSPSSLSASVGDRVTITCRASQGISSAL |
| | | AWYQQKPGKAPKLLIYDASSLESGVPSRFSGSGSGTDFTLTISS |
| | | LQPEDFATYYCQQFNSYPLTFGGGTKVEIKTTTPAPRPPTPAPT |
| | | IASQPLSLRPEACRPAAGGAVHTRGLDFACDFWVLVVVGGVL |
| | | ACYSLLVTVAFIIFWVRSKRSRLLHSDYMNMTPRRPGPTRKH |
| | | YQPYAPPRDFAAYRSKRGRKKLLYIFKQPFMRPVQTTQEEDG |
| | | CSCRFPEEEEGGCELRVKFSRSADAPAYKQGQNQLYNELNLG |
| | | RREEYDVLDKRRGRDPEMGGKPRRKNPQEGLYNELQKDKM |
| | | AEAYSEIGMKGERRRGKGHDGLYQGLSTATKDTYDALHMQA |
| | | LPPR |
| 45 | 330 | QVQLVESGGGLVKPGGSLRLSCAASGFTFSDYYMSWIRQAPG |
| | | KGLEWVSYISSSGSTIYYADSVKGRFTISRDNAKNSLYLQMNS |
| | | LRAEDTAVYYCARNIYMGGIWFDPWGQGTLVTVSSGGGGSG |
| | | GGGSGGGGSGGAIQLTQSPSSLSASVGDRVTITCRASQGISSAL |
| | | AWYQQKPGKAPKLLIYDASSLESGVPSRFSGSGSGTDFTLTISS |
| | | LQPEDFATYYCQQFNSYPLTFGGGTKVEIKTTTPAPRPPTPAPT |
| | | IASQPLSLRPEACRPAAGGAVHTRGLDFACDFWVLVVVGGVL |
| | | ACYSLLVTVAFIIFWVRSKRSRLLHSDYMNMTPRRPGPTRKH |
| | | YQPYAPPRDFAAYRSKRGRKKLLYIFKQPFMRPVQTTQEEDG |
| | | CSCRFPEEEEGGCELRVKFSRSADAPAYKQGQNQLYNELNLG |
| | | RREEYDVLDKRRGRDPEMGGKPRRKNPQEGLYNELQKDKM |
| | | AEAYSEIGMKGERRRGKGHDGLYQGLSTATKDTYDALHMQA |
| | | LPPR |
| 46 | 331 | QVQLVESGGGLVKPGGSLRLSCAASGFTFSDYYMSWIRQAPG |
| | | KGLEWVSYISSSGSTIYYADSVKGRFTISRDNAKNSLYLQMNS |
| | | LRAEDTAVYYCARLTVRTGAFDIWGQGTMVTVSSGGGGSGG |
| | | GGSGGGGSGGAIQLTQSPSSLSASVGDRVTITCRASQGISSALA |
| | | WYQQKPGKAPKLLIYDASSLESGVPSRFSGSGSGTDFTLTISSL |
| | | QPEDFATYYCQQFNSYPLTFGGGTKVEIKTTTPAPRPPTPAPTI |
| | | ASQPLSLRPEACRPAAGGAVHTRGLDFACDFWVLVVVGGVL |
| | | ACYSLLVTVAFIIFWVRSKRSRLLHSDYMNMTPRRPGPTRKH |
| | | YQPYAPPRDFAAYRSKRGRKKLLYIFKQPFMRPVQTTQEEDG |
| | | CSCRFPEEEEGGCELRVKFSRSADAPAYKQGQNQLYNELNLG |
| | | RREEYDVLDKRRGRDPEMGGKPRRKNPQEGLYNELQKDKM |
| | | AEAYSEIGMKGERRRGKGHDGLYQGLSTATKDTYDALHMQA |
| | | LPPR |
| 47 | 332 | QVQLVESGGGLVKPGGSLRLSCAASGFTFSDYYMSWIRQAPG |
| | | KGLEWVSYISSSGSTIYYADSVKGRFTISRDNAKNSLYLQMNS |
| | | LRAEDTAVYYCARLRTAHLDFDLWGRGTLVTVSSGGGGSGG |
| | | GGSGGGGSGGAIQLTQSPSSLSASVGDRVTITCRASQGISSALA |
| | | WYQQKPGKAPKLLIYDASSLESGVPSRFSGSGSGTDFTLTISSL |
| | | QPEDFATYYCQQFNSYPLTFGGGTKVEIKTTTPAPRPPTPAPTI |
| | | ASQPLSLRPEACRPAAGGAVHTRGLDFACDFWVLVVVGGVL |
| | | ACYSLLVTVAFIIFWVRSKRSRLLHSDYMNMTPRRPGPTRKH |
| | | YQPYAPPRDFAAYRSKRGRKKLLYIFKQPFMRPVQTTQEEDG |
| | | CSCRFPEEEEGGCELRVKFSRSADAPAYKQGQNQLYNELNLG |
| | | RREEYDVLDKRRGRDPEMGGKPRRKNPQEGLYNELQKDKM |
| | | AEAYSEIGMKGERRRGKGHDGLYQGLSTATKDTYDALHMQA |
| | | LPPR |
| 48 | 333 | QVQLVESGGGLVKPGGSLRLSCAASGFTFSDYYMSWIRQAPG |
| | | KGLEWVSYISSSGSTIYYADSVKGRFTISRDNAKNSLYLQMNS |
| | | LRAEDTAVYYCARDLIFPVVFDYWGQGTLVTVSSGGGGSGG |
| | | GGSGGGGSGGAIQLTQSPSSLSASVGDRVTITCRASQGISSALA |
| | | WYQQKPGKAPKLLIYDASSLESGVPSRFSGSGSGTDFTLTISSL |
| | | QPEDFATYYCQQFNSYPLTFGGGTKVEIKTTTPAPRPPTPAPTI |
| | | ASQPLSLRPEACRPAAGGAVHTRGLDFACDFWVLVVVGGVL |
| | | ACYSLLVTVAFIIFWVRSKRSRLLHSDYMNMTPRRPGPTRKH |
| | | YQPYAPPRDFAAYRSKRGRKKLLYIFKQPFMRPVQTTQEEDG |
| | | CSCRFPEEEEGGCELRVKFSRSADAPAYKQGQNQLYNELNLG |
| | | RREEYDVLDKRRGRDPEMGGKPRRKNPQEGLYNELQKDKM |
| | | AEAYSEIGMKGERRRGKGHDGLYQGLSTATKDTYDALHMQA |
| | | LPPR |
| 49 | 334 | QVQLVESGGGLVKPGGSLRLSCAASGFTFSDYYMSWIRQAPG |
| | | KGLEWVSYISSSGSTIYYADSVKGRFTISRDNAKNSLYLQMNS |
| | | LRAEDTAVYYCARDGYRKYGYVFFDIWGQGTMVTVSSGGG |
| | | GSGGGGSGGGGSGGAIQLTQSPSSLSASVGDRVTITCRASQGIS |
| | | SALAWYQQKPGKAPKLLIYDASSLESGVPSRFSGSGSGTDFTL |
| | | TISSLQPEDFATYYCQQFNSYPLTFGGGTKVEIKTTTPAPRPPT |
| | | PAPTIASQPLSLRPEACRPAAGGAVHTRGLDFACDFWVLVVV |
| | | GGVLACYSLLVTVAFIIFWVRSKRSRLLHSDYMNMTPRRPGP |
| | | TRKHYQPYAPPRDFAAYRSKRGRKKLLYIFKQPFMRPVQTTQ |
| | | EEDGCSCRFPEEEEGGCELRVKFSRSADAPAYKQGQNQLYNE |
| | | LNLGRREEYDVLDKRRGRDPEMGGKPRRKNPQEGLYNELQK |
| | | DKMAEAYSEIGMKGERRRGKGHDGLYQGLSTATKDTYDALH |
| | | MQALPPR |
| 50 | 335 | QVQLVESGGGLVKPGGSLRLSCAASGFTFSDYYMSWIRQAPG |
| | | KGLEWVSYISSSGSTIYYADSVKGRFTISRDNAKNSLYLQMNS |
| | | LRAEDTAVYYCARDGRYRRFWHAFDIWGQGTMVTVSSGGG |
| | | GSGGGGSGGGGSGGAIQLTQSPSSLSASVGDRVTITCRASQGIS |
| | | SALAWYQQKPGKAPKLLIYDASSLESGVPSRFSGSGSGTDFTL |
| | | TISSLQPEDFATYYCQQFNSYPLTFGGGTKVEIKTTTPAPRPPT |
| | | PAPTIASQPLSLRPEACRPAAGGAVHTRGLDFACDFWVLVVV |
| | | GGVLACYSLLVTVAFIIFWVRSKRSRLLHSDYMNMTPRRPGP |
| | | TRKHYQPYAPPRDFAAYRSKRGRKKLLYIFKQPFMRPVQTTQ |
| | | EEDGCSCRFPEEEEGGCELRVKFSRSADAPAYKQGQNQLYNE |
| | | LNLGRREEYDVLDKRRGRDPEMGGKPRRKNPQEGLYNELQK |
| | | DKMAEAYSEIGMKGERRRGKGHDGLYQGLSTATKDTYDALH |
| | | MQALPPR |
| 51 | 336 | QVQLVESGGGLVKPGGSLRLSCAASGFTFSDYYMSWIRQAPG |
| | | KGLEWVSYISSSGSTIYYADSVKGRFTISRDNAKNSLYLQMNS |
| | | LRAEDTAVYYCARAHIRGYFDLWGRGTLVTVSSGGGGSGGG |
| | | GSGGGGSGGAIQLTQSPSSLSASVGDRVTITCRASQGISSALA |
| | | WYQQKPGKAPKLLIYDASSLESGVPSRFSGSGSGTDFTLTISSL |
| | | QPEDFATYYCQQFNSYPLTFGGGTKVEIKTTTPAPRPPTPAPTI |
| | | ASQPLSLRPEACRPAAGGAVHTRGLDFACDFWVLVVVGGVL |
| | | ACYSLLVTVAFIIFWVRSKRSRLLHSDYMNMTPRRPGPTRKH |
| | | YQPYAPPRDFAAYRSKRGRKKLLYIFKQPFMRPVQTTQEEDG |
| | | CSCRFPEEEEGGCELRVKFSRSADAPAYKQGQNQLYNELNLG |
| | | RREEYDVLDKRRGRDPEMGGKPRRKNPQEGLYNELQKDKM |
| | | AEAYSEIGMKGERRRGKGHDGLYQGLSTATKDTYDALHMQA |
| | | LPPR |
| 52 | 337 | EVQLLESGGGLVQPGGSLRLSCAASGFTFSSYAMSWVRQAPG |
| | | KGLEWVSAISGSGGSTYYADSVKGRFTISRDNSKNTLYLQMN |
| | | SLRAEDTAVYYCATWMGGGGRWYFDLWGRGTLVTVSSGGG |
| | | GSGGGGSGGGGSGGAIQLTQSPSSLSASVGDRVTITCRASQGIS |
| | | SALAWYQQKPGKAPKLLIYDASSLESGVPSRFSGSGSGTDFTL |
| | | TISSLQPEDFATYYCQQFNNYPLTFGGGTKVEIKTTTPAPRPPT |
| | | PAPTIASQPLSLRPEACRPAAGGAVHTRGLDFACDFWVLVVV |
| | | GGVLACYSLLVTVAFIIFWVRSKRSRLLHSDYMNMTPRRPGP |
| | | TRKHYQPYAPPRDFAAYRSKRGRKKLLYIFKQPFMRPVQTTQ |
| | | EEDGCSCRFPEEEEGGCELRVKFSRSADAPAYKQGQNQLYNE |
| | | LNLGRREEYDVLDKRRGRDPEMGGKPRRKNPQEGLYNELQK |
| | | DKMAEAYSEIGMKGERRRGKGHDGLYQGLSTATKDTYDALH |
| | | MQALPPR |
| 53 | 338 | EVQLLESGGGLVQPGGSLRLSCAASGFTFSSYAMSWVRQAPG |
| | | KGLEWVSAISGSGGSTYYADSVKGRFTISRDNSKNTLYLQMN |
| | | SLRAEDTAVYYCARTSRTTWYFDLWGRGTLVTVSSGGGGSG |
| | | GGGSGGGGSGGAIQLTQSPSSLSASVGDRVTITCRASQGISSAL |
| | | AWYQQKPGKAPKLLIYDASSLESGVPSRFSGSGSGTDFTLTISS |
| | | LQPEDFATYYCQQFNNYPLTFGGGTKVEIKTTTPAPRPPTPAP |
| | | TIASQPLSLRPEACRPAAGGAVHTRGLDFACDFWVLVVVGGV |
| | | LACYSLLVTVAFIIFWVRSKRSRLLHSDYMNMTPRRPGPTRKH |
| | | YQPYAPPRDFAAYRSKRGRKKLLYIFKQPFMRPVQTTQEEDG |
| | | CSCRFPEEEEGGCELRVKFSRSADAPAYKQGQNQLYNELNLG |
| | | RREEYDVLDKRRGRDPEMGGKPRRKNPQEGLYNELQKDKM |
| | | AEAYSEIGMKGERRRGKGHDGLYQGLSTATKDTYDALHMQA |
| | | LPPR |
| 54 | 339 | EVQLLESGGGLVQPGGSLRLSCAASGFTFSSYAMSWVRQAPG |
| | | KGLEWVSAISGSGGSTYYADSVKGRFTISRDNSKNTLYLQMN |
| | | SLRAEDTAVYYCAKWMGGGGRLYFDLWGRGTLVTVSSGGG |
| | | GSGGGGSGGGGSGGAIQLTQSPSSLSASVGDRVTITCRASQGIS |
| | | SALAWYQQKPGKAPKLLIYDASSLESGVPSRFSGSGSGTDFTL |
| | | TISSLQPEDFATYYCQQFNNYPLTFGGGTKVEIKTTTPAPRPPT |
| | | PAPTIASQPLSLRPEACRPAAGGAVHTRGLDFACDFWVLVVV |
| | | GGVLACYSLLVTVAFIIFWVRSKRSRLLHSDYMNMTPRRPGP |
| | | TRKHYQPYAPPRDFAAYRSKRGRKKLLYIFKQPFMRPVQTTQ |
| | | EEDGCSCRFPEEEEGGCELRVKFSRSADAPAYKQGQNQLYNE |
| | | LNLGRREEYDVLDKRRGRDPEMGGKPRRKNPQEGLYNELQK |
| | | DKMAEAYSEIGMKGERRRGKGHDGLYQGLSTATKDTYDALH |
| | | MQALPPR |
| 55 | 340 | EVQLLESGGGLVQPGGSLRLSCAASGFTFSSYAMSWVRQAPG |
| | | KGLEWVSAISGSGGSTYYADSVKGRFTISRDNSKNTLYLQMN |
| | | SLRAEDTAVYYCAKWGGRLYWYFDLWGRGTLVTVSSGGGG |
| | | SGGGGSGGGGSGGAIQLTQSPSSLSASVGDRVTITCRASQGISS |
| | | ALAWYQQKPGKAPKLLIYDASSLESGVPSRFSGSGSGTDFTLT |
| | | ISSLQPEDFATYYCQQFNNYPLTFGGGTKVEIKTTTPAPRPPTP |
| | | APTIASQPLSLRPEACRPAAGGAVHTRGLDFACDFWVLVVVG |
| | | GVLACYSLLVTVAFIIFWVRSKRSRLLHSDYMNMTPRRPGPTR |
| | | KHYQPYAPPRDFAAYRSKRGRKKLLYIFKQPFMRPVQTTQEE |
| | | DGCSCRFPEEEEGGCELRVKFSRSADAPAYKQGQNQLYNELN |
| | | LGRREEYDVLDKRRGRDPEMGGKPRRKNPQEGLYNELQKDK |
| | | MAEAYSEIGMKGERRRGKGHDGLYQGLSTATKDTYDALHM |
| | | QALPPR |
| 56 | 341 | EVQLLESGGGLVQPGGSLRLSCAASGFTFSSYAMSWVRQAPG |
| | | KGLEWVSAISGSGGSTYYADSVKGRFTISRDNSKNTLYLQMN |
| | | SLRAEDTAVYYCAKVIRQLWYFDLWGRGTLVTVSSGGGGSG |
| | | GGGSGGGGSGGAIQLTQSPSSLSASVGDRVTITCRASQGISSAL |
| | | AWYQQKPGKAPKLLIYDASSLESGVPSRFSGSGSGTDFTLTISS |
| | | LQPEDFATYYCQQFNNYPLTFGGGTKVEIKTTTPAPRPPTPAP |
| | | TIASQPLSLRPEACRPAAGGAVHTRGLDFACDFWVLVVVGGV |
| | | LACYSLLVTVAFIIFWVRSKRSRLLHSDYMNMTPRRPGPTRKH |
| | | YQPYAPPRDFAAYRSKRGRKKLLYIFKQPFMRPVQTTQEEDG |
| | | CSCRFPEEEEGGCELRVKFSRSADAPAYKQGQNQLYNELNLG |
| | | RREEYDVLDKRRGRDPEMGGKPRRKNPQEGLYNELQKDKM |
| | | AEAYSEIGMKGERRRGKGHDGLYQGLSTATKDTYDALHMQA |
| | | LPPR |
| 57 | 342 | EVQLLESGGGLVQPGGSLRLSCAASGFTFSSYAMSWVRQAPG |
| | | KGLEWVSAISGSGGSTYYADSVKGRFTISRDNSKNTLYLQMN |
| | | SLRAEDTAVYYCAKVFANSWYFDLWGRGTLVTVSSGGGGSG |
| | | GGGSGGGGSGGAIQLTQSPSSLSASVGDRVTITCRASQGISSAL |
| | | AWYQQKPGKAPKLLIYDASSLESGVPSRFSGSGSGTDFTLTISS |
| | | LQPEDFATYYCQQFNNYPLTFGGGTKVEIKTTTPAPRPPTPAP |
| | | TIASQPLSLRPEACRPAAGGAVHTRGLDFACDFWVLVVVGGV |
| | | LACYSLLVTVAFIIFWVRSKRSRLLHSDYMNMTPRRPGPTRKH |
| | | YQPYAPPRDFAAYRSKRGRKKLLYIFKQPFMRPVQTTQEEDG |
| | | CSCRFPEEEEGGCELRVKFSRSADAPAYKQGQNQLYNELNLG |
| | | RREEYDVLDKRRGRDPEMGGKPRRKNPQEGLYNELQKDKM |
| | | AEAYSEIGMKGERRRGKGHDGLYQGLSTATKDTYDALHMQA |
| | | LPPR |
| 58 | 343 | EVQLLESGGGLVQPGGSLRLSCAASGFTFSSYAMSWVRQAPG |
| | | KGLEWVSAISGSGGSTYYADSVKGRFTISRDNSKNTLYLQMN |
| | | SLRAEDTAVYYCAKVDRTTWYFDLWGRGTLVTVSSGGGGSG |
| | | GGGSGGGGSGGAIQLTQSPSSLSASVGDRVTITCRASQGISSAL |
| | | AWYQQKPGKAPKLLIYDASSLESGVPSRFSGSGSGTDFTLTISS |
| | | LQPEDFATYYCQQFNNYPLTFGGGTKVEIKTTTPAPRPPTPAP |
| | | TIASQPLSLRPEACRPAAGGAVHTRGLDFACDFWVLVVVGGV |
| | | LACYSLLVTVAFIIFWVRSKRSRLLHSDYMNMTPRRPGPTRKH |
| | | YQPYAPPRDFAAYRSKRGRKKLLYIFKQPFMRPVQTTQEEDG |
| | | CSCRFPEEEEGGCELRVKFSRSADAPAYKQGQNQLYNELNLG |
| | | RREEYDVLDKRRGRDPEMGGKPRRKNPQEGLYNELQKDKM |
| | | AEAYSEIGMKGERRRGKGHDGLYQGLSTATKDTYDALHMQA |
| | | LPPR |
| 59 | 344 | EVQLLESGGGLVQPGGSLRLSCAASGFTFSSYAMSWVRQAPG |
| | | KGLEWVSAISGSGGSTYYADSVKGRFTISRDNSKNTLYLQMN |
| | | SLRAEDTAVYYCAKRWGKDGPYWYFDLWGRGTLVTVSSGG |
| | | GGSGGGGSGGGGSGGAIQLTQSPSSLSASVGDRVTITCRASQG |
| | | ISSALAWYQQKPGKAPKLLIYDASSLESGVPSRFSGSGSGTDFT |
| | | LTISSLQPEDFATYYCQQFNNYPLTFGGGTKVEIKTTTPAPRPP |
| | | TPAPTIASQPLSLRPEACRPAAGGAVHTRGLDFACDFWVLVV |
| | | VGGVLACYSLLVTVAFIIFWVRSKRSRLLHSDYMNMTPRRPG |
| | | PTRKHYQPYAPPRDFAAYRSKRGRKKLLYIFKQPFMRPVQTT |
| | | QEEDGCSCRFPEEEEGGCELRVKFSRSADAPAYKQGQNQLYN |
| | | ELNLGRREEYDVLDKRRGRDPEMGGKPRRKNPQEGLYNELQ |
| | | KDKMAEAYSEIGMKGERRRGKGHDGLYQGLSTATKDTYDAL |
| | | HMQALPPR |
| 60 | 345 | EVQLLESGGGLVQPGGSLRLSCAASGFTFSSYAMSWVRQAPG |
| | | KGLEWVSAISGSGGSTYYADSVKGRFTISRDNSKNTLYLQMN |
| | | SLRAEDTAVYYCAKRRDSYGPYWYFDLWGRGTLVTVSSGGG |
| | | GSGGGGSGGGGSGGAIQLTQSPSSLSASVGDRVTITCRASQGIS |
| | | SALAWYQQKPGKAPKLLIYDASSLESGVPSRFSGSGSGTDFTL |
| | | TISSLQPEDFATYYCQQFNNYPLTFGGGTKVEIKTTTPAPRPPT |
| | | PAPTIASQPLSLRPEACRPAAGGAVHTRGLDFACDFWVLVVV |
| | | GGVLACYSLLVTVAFIIFWVRSKRSRLLHSDYMNMTPRRPGP |
| | | TRKHYQPYAPPRDFAAYRSKRGRKKLLYIFKQPFMRPVQTTQ |
| | | EEDGCSCRFPEEEEGGCELRVKFSRSADAPAYKQGQNQLYNE |
| | | LNLGRREEYDVLDKRRGRDPEMGGKPRRKNPQEGLYNELQK |
| | | DKMAEAYSEIGMKGERRRGKGHDGLYQGLSTATKDTYDALH |
| | | MQALPPR |
| 61 | 346 | EVQLLESGGGLVQPGGSLRLSCAASGFTFSSYAMSWVRQAPG |
| | | KGLEWVSAISGSGGSTYYADSVKGRFTISRDNSKNTLYLQMN |
| | | SLRAEDTAVYYCAKNRPPPGYWYFDLWGRGTLVTVSSGGGG |
| | | SGGGGSGGGGSGGAIQLTQSPSSLSASVGDRVTITCRASQGISS |
| | | ALAWYQQKPGKAPKLLIYDASSLESGVPSRFSGSGSGTDFTLT |
| | | ISSLQPEDFATYYCQQFNNYPLTFGGGTKVEIKTTTPAPRPPTP |
| | | APTIASQPLSLRPEACRPAAGGAVHTRGLDFACDFWVLVVVG |
| | | GVLACYSLLVTVAFIIFWVRSKRSRLLHSDYMNMTPRRPGPTR |
| | | KHYQPYAPPRDFAAYRSKRGRKKLLYIFKQPFMRPVQTTQEE |
| | | DGCSCRFPEEEEGGCELRVKFSRSADAPAYKQGQNQLYNELN |
| | | LGRREEYDVLDKRRGRDPEMGGKPRRKNPQEGLYNELQKDK |
| | | MAEAYSEIGMKGERRRGKGHDGLYQGLSTATKDTYDALHM |
| | | QALPPR |
| 62 | 347 | EVQLLESGGGLVQPGGSLRLSCAASGFTFSSYAMSWVRQAPG |
| | | KGLEWVSAISGSGGSTYYADSVKGRFTISRDNSKNTLYLQMN |
| | | SLRAEDTAVYYCAKGRRFSWYFDLWGRGTLVTVSSGGGGSG |
| | | GGGSGGGGSGGAIQLTQSPSSLSASVGDRVTITCRASQGISSAL |
| | | AWYQQKPGKAPKLLIYDASSLESGVPSRFSGSGSGTDFTLTISS |
| | | LQPEDFATYYCQQFNNYPLTFGGGTKVEIKTTTPAPRPPTPAP |
| | | TIASQPLSLRPEACRPAAGGAVHTRGLDFACDFWVLVVVGGV |
| | | LACYSLLVTVAFIIFWVRSKRSRLLHSDYMNMTPRRPGPTRKH |
| | | YQPYAPPRDFAAYRSKRGRKKLLYIFKQPFMRPVQTTQEEDG |
| | | CSCRFPEEEEGGCELRVKFSRSADAPAYKQGQNQLYNELNLG |
| | | RREEYDVLDKRRGRDPEMGGKPRRKNPQEGLYNELQKDKM |
| | | AEAYSEIGMKGERRRGKGHDGLYQGLSTATKDTYDALHMQA |
| | | LPPR |

[0731] Six binders were expressed as third-generation (Gen3) chimeric antigen receptors (CAR1-CAR6) [corresponding to #16, 17, 18, 29, 55, and 59, respectively, in Tables 1˜4 and 20], which were compared to anti-MSLN scFvs from the literature (SS1, M5 and m912) in Jurkat functional assays. The CARs displayed a range of sensitivities (EC50) and maximal responses (Eₘₐₓ) (FIG. 24A). All constructs were Gen3 except SS1 (Gen2). Jurkat cell dose-response (RLU) was measured to assess the sensitivity in a 6 hour co-culture assay: (1) Titrated MSLN-encoding mRNA was used to transfect HEK293 cells; (2) QIFIKIT (quantitative analysis kit, Agilent®) was used to convert flow-cytometry based surface expression to MSLN molecules/cell; and, (3) The molecule/cell sensitivities (EC50) of 6 novel and three benchmark CARs were calculated from fitting the dose-response curves. For those CARs with sensitivities below the limit of detection of the assay, EC50 was reported as <3000 MSLN molecules/cell. Maximum signal (Eₘₐₓ) for each construct was also noted. Experiments were repeated 1-4 times.

[0732] Table 21 shows the selectivity window and killing efficiency of HeLa cells by transduced primary T cells. Quantification of the selectivity window between killing of MSLN+A2− and MSLN+A2+ HeLa cells with activator and blocker+ primary T cells. Killing efficiency describes difference in killing of MSLN+A2− HeLa cells by activator and blocker+ T cells compared to activator+(only) T cells. Both measures are calculated up to the time corresponding to 80% maximum observed killing.

TABLE 21

| | E:T | Time (hours) | | |
|---|---|---|---|---|
| | (HeLa | to 80% max | Selectivity | Killing |
| Activator | target) | killing | window | efficiency |
| hM5 CAR | 4:1 | 28 | 6.9 | 1.2 |
| mSS1 CAR | 4:1 | 44 | 6.2 | 1.1 |
| CAR 18 | 4:1 | 24 | 21.4 | 1.1 |
| CAR 29 | 4:1 | 20 | 7.0 | 1.0 |
| hM5 CAR | 2:1 | 64 | 5.5 | 0.8 |
| mSS1 CAR | 2:1 | 72+ | n/d | 0.7 |
| CAR 18 | 2:1 | 56 | 20.3 | 0.8 |
| CAR 29 | 2:1 | 44 | 7.6 | 0.9 |

n/d = not determined due to poor overall killing

[0733] Six binders (CAR1-6) were compared to benchmark MSLN scFvs from the literature (SS1, M5 and m912) in Jurkat functional assays [12-14]. All were expressed as Gen3 CARs, with the exception of Gen2 SS1. For MSLN(+) target cells, HEK293 cells transfected with synthetic MSLN mRNA were used. The CARs displayed a range of sensitivities (EC50) and maximal responses (Eₘₐₓ) (FIG. 24A). Of the six binders, all but CAR 16 exhibit higher sensitivity than hM5 and sSS1.

[0734] In short, an extensive campaign to identify anti-MSLN binders yielded hundreds of sequences identified in an NGS screen, and 62 candidate constructs were produced, all of which bind MSLN. Six of these shown superior activity. CAR 18 and CAR 29 demonstrated superior sensitivity to comparator CAR constructs.

[0735] Previous work suggested that Eₘₐₓ is related to surface expression of the receptor and EC₅₀ to its binding and signal transduction properties, especially the LBD [15,16]. The EC₅₀ was converted from relative response measured by luminescence in Jurkat cells to absolute molecules/cell using standard curves and QIFIKIT methodology necessary [27]. One of the benchmark CARs (m912) displayed low functional sensitivity, with an EC₅₀ estimated at ˜80K molecules/cell. The EC₅₀s for the other benchmarks and novel CARs ranged downwards of −6K molecules/cell. Several novel LBDs assayed as CARs in Jurkat cells had EC50s below the limit of detection (<3K molecules/cell). As an indicator of selectivity, CAR3 and the benchmark M5 were tested for responsiveness to a panel of MSLN(+) and (−) cell lines. Both CARs displayed MSLN-specific activation and were inactive against MSLN(−) lines (FIGS. 24B and 25A).

### MSLN Tmod Constructs are Blocked Efficiently by HLA-A*02 Antigen in Jurkat and Primary T Cells

[0736] CAR1-6 and the benchmark CARs were tested as components of Tmod constructs where the CARs were paired with an A*02-directed inhibitory receptor or “blocker” previously shown to inhibit functional response in Jurkat and primary T cells [18]. This blocker comprised an A*02-binding scFv fused to the hinge, transmembrane and intracellular domains of the ITIM-containing LIR-1 protein (FIG. 22B). As target cells we used cell lines characterized for MSLN surface expression (FIGS. 25A and 25B, FIGS. 26A and 26B). All the CARs were blocked in a ligand-dependent manner by the A*02-directed LIR-1 blocker (FIG. 27A). Because of the combination of high sensitivity, selectivity and effective functional pairing with the A*02 blocker, CAR3 was selected for further study as the MSLN Tmod lead activator construct.

[0737] The MSLN CAR3 Tmod construct was examined in detail in a series of quantitative mRNA titration experiments for activation and blocking sensitivity in Jurkat cells (FIGS. 27B and 27C). For target cells, the cervical carcinoma HeLa cell line that, like most other cancer lines, expresses endogenous MSLN was used. This line is HLA-A*02(−). To control MSLN levels, a variant with MSLN inactivated by CRISPR was generated. mRNA titration experiments enabled estimation of EC₅₀ and IC₅₀ for the MSLN CAR3 Tmod construct and these parameters were viewed in the context of the expression levels of antigens on normal and tumor tissues derived from high-quality public databases (FIG. 28A).

[0738] To make these comparisons, a correlation between MSLN mRNA and surface protein levels was established as a first step (FIG. 25B). The same was done for HLA-A and the information used to plot the HLA-A and MSLN levels of different tissues relative to the EC₅₀ and IC50 of the MSLN Tmod construct. The large majority of normal tissues expressed levels of MSLN well below the EC₅₀ of MSLN Tmod. In contrast, certain tissues including lung expressed MSLN at a level well above the EC₅₀ of the Tmod construct and, therefore, were considered high risk absent an effective blocker. However, these at-risk tissues also express HLA-A levels above the Tmod IC50, suggesting they will be protected against cytotoxicity by the A*02-targeted LIR-1 blocker component of Tmod. The cell lines (including transgenic HLA-A*02 HeLa and MS751) used to model normal and tumor tissues in functional assays are also shown on the graph.

[0739] The behavior of the MSLN CAR3 Tmod construct was then tested in primary T cells. Cytotoxicity was the principal readout, with IFN-γ secretion as a secondary measure. Target cells were HeLa cells and variants: (i) native MSLN(+)A*02(−) HeLa cells modeled tumor cells without blocker antigen; and, (ii) transgenic A*02(+) variant HeLa cells modeled normal mesothelial cells. Combinations of different constructs and target cells demonstrated that all MSLN CAR Tmod constructs kill tumor cells potently and block killing in an A*02-ligand-dependent fashion (FIG. 28B). Two other MSLN CARs from the literature (SS1 and M5) were used for comparison (FIG. 29A). Cytotoxicity was mirrored by IFN-γ release (FIG. 29B). Thus, the Tmod constructs composed of an HLA-A*02-directed blocker and different MSLN CAR activators displayed high potency and specificity for MSLN(+)A*02(−) target cells in both Jurkat and primary T cell assays.

### The MSLN CAR3 Tmod Construct Mediates Selective, Reversible Cytotoxicity in Mixed-Cell and Serial Cultures

[0740] A variety of other properties of the MSLN CAR3 Tmod construct important in the context of cancer cell therapy were tested. The construct mediated antigen-selective cytotoxicity in mixed cultures of tumor and normal target cells: Native MSLN(+)HLA-A*02(−) HeLa cells labeled with RFP were mixed at different ratios with MSLN(+)A*02(+) cells labeled with GFP. These cocultures were exposed to T cells engineered with different receptor constructs and imaged. Whereas CAR-only constructs killed indiscriminately, the Tmod constructs killed the native HeLa tumor cells only, leaving the A*02(+) cells unharmed (FIG. 30A). Selectivity was detectable even at normal:tumor cell ratios of 9:1 (FIG. 30B, FIGS. 31A and 31B).

[0741] The capacity of Tmod cells to switch between ON (active killing) and OFF (blocked) states was examined using cytotoxicity assays as readout. In these experiments the transduced T cells were transferred from one batch of target cells to another (FIG. 32A, FIG. 33A). The Tmod cells displayed the capacity to activate and kill after being exposed for 2 days to normal cells where they were quiescent. The reverse was also true. Tmod cells engaged in killing tumor cells were able to quickly switch to the OFF state and refrain from killing the normal cells after transfer and without a rest period. The ability to switch states was maintained through two cycles, over a total of four days.

[0742] It was investigated whether soluble MSLN (sMSLN), which is present in the blood of some cancer patients at high levels (median ˜200 ng/ml; range 20-2,000 ng/ml [19]), interfered with MSLN CAR3 Tmod cells. sMSLN added to the cultures at 500 ng/ml had no effect on function of either the CAR or Tmod T cells FIGS. 33B and 33C). Together, these results suggested that MSLN CAR3 Tmod mediates selective, reversible cytotoxicity in mixed cultures of tumor and normal cells and is unaffected by sMSLN at levels observed in some cancer patients' blood. All of these features are consistent with a cell therapy that has the potential to be safe and efficacious in selected cancer patients.

### MSLN CAR3 Tmod Cells Display No Detectable Off-Target Activity

[0743] To systematically explore off-target reactivity of MSLN CAR3 Tmod cells, Jurkat cell activation was tested by a panel of target cell lines chosen to encompass the large majority of adult gene expression (Wang et al., in preparation; see Methods). Positive controls were used to confirm that effector cells could be activated by MSLN(+) cell lines, and negative controls were used to set a baseline for response (FIG. 26B; FIG. 32B). No detectable responses were triggered in CAR3 Tmod Jurkat cells, despite high sensitivity of the assay, estimated at 1,000 molecules/cell.

### The MSLN CAR3 Tmod Construct Mediates Selective Killing of Tumor Cells in a Xenograft Model

[0744] To examine behavior of MSLN CAR3 Tmod cells in vivo, a mouse xenograft model was used. HeLa cells did not grow well in the immunocompromised (NSG) mice, so another cervical cancer cell line, MS751, was developed as grafted target cells. The native MSLN was used as the activator antigen and the blocker antigen HLA-A*02 was engineered by gene transfer to better approximate normal tissue levels. MSLN(+)A*02(−) MS751 cells, generated by CRISPR knockout of HLA-A*02, modeled tumor while the MSLN(+)A*02(+) transgenic variant modeled normal cells in these in vivo experiments.

[0745] The cell lines were engineered with luciferase to enable bioluminescence as an independent readout of tumor survival and growth. Mice (10/cohort) were implanted with tumor cells on their left flank and normal cells on their right flank in half of the mice in each cohort, and vice versa in the other half to control for flank growth variation (FIG. 34A). After xenografts reached ˜100-150 mm³ in volume, mice were infused via tail vein with 2E7 total T cells/mouse. After a short delay, both the CARs and the Tmod constructs killed the MSLN(+)A*02(−) tumor cells equally well measured by caliper and bioluminescence intensity (FIGS. 34B and 34C, FIGS. 35B and 35C). Whereas the CAR-only T cells killed both tumor and normal with equal effectiveness, Tmod cells killed only the tumor grafts, mirroring in vitro cytotoxicity (FIG. 14A). In the presence of Tmod cells, the normal cell grafts grew comparably to those in the control groups treated with untransduced T cells or saline. These results dramatically demonstrated selectivity of the MSLN Tmod system in a mammalian body, consistent with other activator-blocker pairs which have been observed (Sandberg et al., submitted; [18]).

### Extension of the MSLN CAR Tmod Platform

[0746] Use of an HLA-A*02-targeted blocker raises the possibility that the blocker may be bound in cis by endogenous HLA-A*02 molecules produced in autologous T cells. Indeed, decreased blocker binding was observed with HLA-A*02 tetramer in transfected transgenic A*02(+) Jurkat cells compared to native Jurkat A*02(−) cells (FIG. 36). A similar decrease was observed in primary T cells from HLA-A*02(+) donors transduced with MSLN CAR3 Tmod or SS1 Tmod constructs compared to A*02(−) donor T cells (FIG. 36, FIG. 37A). More importantly, this decreased binding translated to poor blocker function in both A*02(+) Jurkat and primary T cells relative to their A*02(−) counterparts (FIG. 36, FIGS. 37B and 37C). These observations illustrated how cis-binding may pose a problem for an autologous MSLN CAR3 Tmod product that utilizes an A*02-directed blocker.

[0747] To address this problem, we developed a solution based on CRISPR inactivation of endogenous (32 microglobulin (B2M). Because B2M is required for all HLA class I expression, this approach was expected to mitigate the cis-binding effect of HLA-A*02. As predicted, knockout of B2M in primary T cells restored blocker binding and function to levels comparable to A*02(−) donor T cells (FIGS. 37A-37C). Thus, CRISPR-mediated abrogation of cis-binding produced MSLN Tmod cells with functional properties in HLA-A*02(+) donors that were indistinguishable from function in HLA-A*02(−) donors. These results suggest that the MSLN CAR3 Tmod construct may be suitable for allogeneic cell therapy and autologous products, provided that a method is employed to reduce expression of A*02 in the patient's T cells.

The MSLN CAR3 can be Paired with an HLA-A*11-Directed Blocker

[0748] The impressive performance of the MSLN CAR3 Tmod construct that utilizes an A*02-directed blocker suggested the possibility that CAR3 might be paired with blockers gated by other HLA class I alleles. If true, this would potentially allow the Tmod platform to be used to treat patients who are not heterozygous for HLA-A*02−a number estimated at >60% of the population [20]. For proof of concept of the modularity of the MSLN Tmod system, HLA-A*11, the most common class I allele in Asian populations was studied [20]. A screen for A*11-selective scFvs was carried out using the same method described for isolation of MSLN scFvs (see Methods, infra). A series of enrichment steps using the mammalian scFv-display library generated several A*11-specific scFvs (FIG. 38A).

[0749] One high-performing scFv (A*11-LBD4) was fused to LIR-1 and paired with the MSLN CAR3 activator in Jurkat cells. This A*11 blocker demonstrated good function with an IC₅₀ estimated at 37,000 molecules/cell from mRNA titration experiments (FIG. 38B). Finally, the MSLN CAR3 paired with the A*11 blocker was confirmed to function well in Jurkat cell and primary T cells with potency and blockade comparable to the MSLN CAR3 Tmod construct that utilizes HLA-A*02 as blocker antigen (FIGS. 39A-39C). Encouraged by these results we converted two other anti-HLA-I monoclonal antibodies, targeting A*03 and B*07, to scFvs and tested them as MSLN Tmod blockers (FIG. 39A). These findings suggest that the Tmod system is sufficiently modular to accommodate pairings of one activator with multiple blockers, thereby extending the accessibility of the cell therapy platform to a larger number of patients.

### Discussion

[0750] Given the distribution of MSLN in the adult body [1, 2, 4], it is vital that the blocker functions well with a MSLN-targeted activator. The properties of the A*02 blocker described here suggest it will inhibit activation signals that arise from the CAR across a broad range of MSLN antigen levels. It is also likely that the blocker will inhibit other sources of T cell activation triggered by the CAR, including off-target. Because the HLA blocker antigen is ubiquitously expressed in nucleated cells, it should provide an inhibitory signal under all circumstances except when the blocker antigen is absent as in tumors selected for LOH. The blocker may also prevent cytokine-release syndrome, a continuing source of toxicity observed for T cell therapies [14, 33], if the stimulus involves normal cells or cell fragments.

[0751] The MSLN therapeutic candidate described here requires selection of patients who are germline heterozygous for the blocker-antigen allele and whose tumors have lost this allele via LOH. Fortunately, such diagnostic tests have been developed recently which utilize the enormous power of DNA sequencing technology [27-29]. DNA-sequence-based LOH detection has sufficient sensitivity to distinguish most cases of clonal vs. subclonal LOH in the tumor, thereby enriching for patients most likely to benefit from the therapy. Because this diagnostic method utilizes genome sequence from the tumor, it detects any allelic variation and is not restricted to HLA-A*02. The lead MSLN Tmod construct described here is applicable to a subset of HLA-A*02(+) patients. With the goal of extending the Tmod platform to other patients, we have shown that the MSLN CAR3 activator can be paired with blockers directed at 3 other HLA-I allelic products including HLA-A*11. A*11 is the most frequent HLA-I allele in most Asian populations and represents a significant opportunity for benefit in parts of the world beyond the US. Indeed, with a collection of blockers directed at 6-8 of the most common HLA-I alleles in the world, it should be possible to cover the large majority of solid tumors that harbor LOH at the HLA locus—estimated to be >15% of solid-tumor mortality at present [22, 30]. In addition we have shown in a parallel line of work that the HLA-A*02 blocker can be paired effectively with other activators including a CAR directed at another well-known tumor-associated antigen, CEA (Sandberg et al., in preparation; 31).

[0752] The modular Tmod system leverages the capacity of cells—unique among therapeutic modalities—to integrate multiple signals into a coordinated response and thus offers a means to address the fundamental obstacles of solid-tumor therapy [18, 21, 22]. Therapeutics must access the tumor and overcome barriers that do not exist for blood cancers where cell therapies have proven effective [23]. T cells have an advantage over most other modalities, including antibodies, in that they possess a natural mechanism for active extravasation and biodistribution (see for review Mastrogiovanni et al. [24]). Furthermore, the Tmod approach described here that exploits LOH mitigates the key constraint on solid-tumor therapeutics posed by normal tissue expression of most targets. Though notoriously non-homogeneous, a large proportion of genetic alterations arise in the founding cell of the neoplasm and are present in all its descendants [25]. Such homogeneous mutations include LOH and, if such clonal LOH can be distinguished via a diagnostic test from later alterations present in tumors, LOH heterogeneity at the HLA locus should not constitute a source of resistance [26]. Unlike single nucleotide substitutions that generate most neoantigens, LOH is an irreversible event and should be stable even after strong selective pressure is applied via therapy. Finally, as use of checkpoint inhibitors becomes more prevalent, rates of HLA-I loss will likely increase, further expanding the pool of patients who may benefit from MSLN Tmod therapeutics [34].

### Materials and Methods

### Cell Line Culture

[0753] Cell lines were purchased from ATCC (American Type Culture Collection) and handled according to manufacturer's instructions: T2, Shp77, Raji, MS751, A-375, A-498, SW982, SW480, HeLa, NIH-OVCAR-3, HepG2, NCI-H508, LNCaP clone FGC, K562, U2OS, BB7.1 and GAP A3 hybridomas. Jurkat cells encoding an NFAT luciferase reporter gene were obtained from BPS Bioscience and maintained in RPMI supplemented with 10% heat-inactivated (HIA) FBS (inactivated at 56° C. for 1 h), 1% penicillin and streptomycin (pen/strep), and 0.4 mg/ml Geneticin. Human peripheral blood mononuclear cells (PBMCs) were obtained from Stem Cell Technologies and thawed in X-VIVO 15 (Lonza) supplemented with 5% HIA human AB serum and activated with T Cell TransAct (Miltenyi Biotec) as recommended by manufacturer. Lentiviral transductions of CAR or CAR Tmod single vector constructs (see FIG. 1b, unless otherwise noted) were done at 24 h post-activation and cultures were maintained in LymphoONE T cell Expansion Medium (Takara Bio) supplemented with 1% HIA human AB serum and 300 IU/mL IL-2.

Molecular Cloning and mRNA In Vitro Transcription

[0754] Activating and blocking CAR constructs were designed and constructed as previously described⁹. Briefly, activating CARs were created by fusing the anti-MSLN scFv LBDs to the CD8α hinge, CD28 transmembrane (TM), and CD28, 4-1BB and CD3ζ intracellular domains (ICD). Blocking CARs were generated by fusing the anti-HLA-A*02, A*03 or B*07 scFv LBDs derived from monoclonal antibodies PA2.1 [32], GAP A3 [36] or BB7.1 [37], respectively, to the hinge, TM and ICD domains of LIR-1. Gene segments were combined using Golden Gate cloning and inserted downstream of a human EF1α promoter in a lentiviral expression vector.

[0755] For messenger RNA (mRNA) preparation, PCR was used to generate the DNA template used for in vitro synthesis mRNA. Briefly, T7 promoter was introduced via N-terminal primer and common overhang regions were used for both N- and C-terminal primers. The PCR product was used as a template for in vitro transcription (IVT) using the T7 ARCA mRNA kit (New England Biolabs, E2060S). The IVT reaction comprised 1× ARCA/NTP mix, 1.25 mM Ψ-UTP (TriLink), 25 ug PCR product template, and 1× T7 RNA polymerase. The IVT reaction was incubated at 37° C. for 2 h, then 2 uL of DNase I (New England Biolabs, M0303S) was added to each reaction and incubated at 37° C. for 15 min. To the IVT reaction, 65 uL water, 10 uL 10× poly-adenylation reaction buffer (NEB M0276S) and 5 uL of poly-adenylation enzyme (NEB M0276S) was added to a total volume of ˜100 uL. The reaction was incubated at 37° C. for 30 min. The resulting product was cleaned using the Monarch RNA cleanup kit (T2040L) according to the manufacturer's protocol.

### MSLN and HLA-A *11 Binder Generation Using Mammalian Display

[0756] Binder generation using the HuTARG mammalian display technology has been previously described (Patent No: U.S. Pat. No. 8,012,714 B2; Wang et al., in press). For the MSLN binder generation, soluble MSLN (catalog #MSN-H82E9) and irrelevant, off-target proteins, EGFR and CEA, were purchased from Acro Biosystems. The HuTARG library was subjected to serial rounds of on-target enrichment and off-target depletion using fluorescence-activated cell sorting (FACS). The HLA-A*11 binder generation campaign was similarly conducted. The HuTARG library was subjected to on-target enrichment using HLA-A*11:01 tetramer and off-target depletion using a pool of 4 unrelated HLA class I tetramers. In the final round of both campaigns, on- and off-target binding cells were collected, and RNA was reverse transcribed into cDNA. Fragments containing the complementarity determining regions (CDRs) were amplified using polymerase chain reaction (PCR) and sequenced by next-generation sequencing (NGS). Binders of interest were selected by comparing the input and output NGS counts.

### MSLN Surface Quantification

[0757] To quantify surface mesothelin molecules, adherent cells were first washed once with DPBS then once with Versene. Cells were coated with Versene and incubated at 37° C. for ˜15 min. After incubation, flasks were tapped vigorously to promote complete detachment. The cells were then diluted with DBPS at 1:2 ratio (Versene:DPBS) and counted. 300,000 cells were centrifuged at 500×g for 5 min. Cells were resuspended in 300 uL 1×FACS buffer (DPBS+1% BSA). 100 uL of aliquot was divided into 2 v-bottom wells. Cells were washed one more time with 100 uL FACS buffer, then stained with 100 uL of anti-MSLN antibody at 10 ug/mL (R&D Systems, clone 618923) on ice for 30 min. After the primary stain, 50 uL of calibration beads from the QIFIKIT (Agilent) were added for washing. The mixture was washed with 100 uL FACS buffer twice, then stained with 100 uL of anti-mouse F(ab′)2-Goat Alexa Fluor 647 (Invitrogen) antibody diluted 2000× in FACS buffer for 45 min on ice. The stained cells and beads were washed 2× with 100 uL FACS buffer, then resuspended in 100 uL FACS buffer to measure fluorescence. The calibration curve plotting median fluorescence intensity of each bead population vs. number of molecules was plotted according to manufacturer's protocol provided by the QIFIKIT (Agilent). The number of endogenous MSLN molecules was determined by fitting the cell's median fluorescence intensity onto the calibration curve generated with the QIFIKIT beads.

### MSLN Activator and Various Blocker Sensitivity Determination

[0758] To determine activator or blocker sensitivities, antigen was titrated into antigen(−) cell lines at various concentrations. Flow cytometry and QIFIKIT methodology [17] using standard curves could then be used to calculate absolute molecules/cell. The EC₅₀ or IC50 value of activators or blockers, respectively, expressed in Jurkat cells was then measured by luminescence. Specifically, HEK293T or HeLa cell transfection with antigen mRNA was performed using the 4D nucleofection kit (Lonza). For single-antigen titrations (i.e., MSLN, HLA-A*02, HLA-A*11, HLA-A*03, HLA-B*07), mRNA was diluted to 1000 ng/uL in SE or SF buffer supplemented with Supplement solution (complete buffer) for HEK293T or HeLa cells respectively. The diluted mRNA was serially diluted 2× by adding stock mRNA to equal volumes of complete buffer 13 times, with the 15th well lacking any added mRNA. Target cells were detached from the flask using TrypLE Express (Gibco). Appropriate number of cells were harvested then resuspended in complete buffer at 11.1e6 viable cells/mL. 22.5 uL of resuspended cells were added to 2.5 uL of serially-diluted mRNA to a final volume of 25 uL cell and mRNA mix. 20 uL of this sample was zapped using the 4D nucleofector using the CM-130 program for HEK293T cells or CN-114 program for HeLa cells. The cells were transferred into 280 uL of MEM+10% FBS+0.1% P/S. 15 uL of the diluted cells were transferred into 384-well plate and incubated 18-24 h at 37° C., 5% CO₂. The remaining diluted cells were transferred to a 96-well plate and kept for next day analysis of surface antigen expression using the QIFIKIT as described above. In parallel, Jurkat-NFAT luciferase effector cells were transfected with appropriate CAR DNA at 1 ug per 1e6 cells or CAR Tmod DNA (single vector construct, unless otherwise noted) at 4 ug per 1e6 cells using the Neon electroporation system using the following parameters: 1500 V, 10 ms, 3 pulses. Transfected cells were immediately transferred to pre-warmed RPMI supplemented with 20% heat-inactivated (HIA) FBS and 0.1% pen/strep and incubated for 18-24 h at 37° C., 5% CO₂. Next, Jurkat cells were counted and resuspended in RPMI+10% HIA FBS and 0.1% pen/strep at 0.67e6 cells per mL. 1e4 resuspended Jurkat cells in 15 uL were then co-cultured with transfected cells in the 384-well plate for 6 h. Luciferase activity was measured using ONE-Step Luciferase Assay System (BPS Bioscience).

[0759] For target cell co-transfections including MSLN and HLA-A*02 the protocol above was used except for minor adjustments to the mRNA dilutions step. mRNA encoding HLA-A*02 and MSLN were prepared by Aldevron and TriLink respectively. Briefly, to generate EC₅₀ curves, a 14-point 2× serial dilution was performed with MSLN mRNA. This serial dilution was combined with each of four dilutions of various constant amounts of A*02 mRNA so that the top concentration of MSLN mRNA was 500 ng/ul and the A*02 mRNA concentrations were as follows: 500 ng/uL, 25 ng/ul, 1.25 ng/uL, and 0 ng/uL. To generate IC50 curves, a 14-point 2× serial dilution was performed with A*02 mRNA. This serial dilution was combined with each of four dilutions of various constant amounts of MSLN mRNA so that the top concentration of A*02 mRNA was 500 ng/uL and the MSLN mRNA concentrations were as follows: 125 ng/uL, 25 ng/ul, 5 ng/uL, and 1 ng/uL.

### Primary T Cell In Vitro Cytotoxicity Assays

[0760] Killing of MSLN(+)A*02(−)RFP(+) tumor or MSLN(+)A*02(+)GFP(+) normal target cells by primary T cells transduced with Gen2 M5 CAR, MSLN CAR3 or CAR3 Tmod single vector constructs was assessed as previously described[9]. Briefly, 2,000 target cells were plated in 25 uL complete LymphoOne media (containing 1% HIA human AB serum) per well in a black, clear-bottom 384-well plate and allowed to adhere overnight at 37° C. with 5% CO₂. For mixed culture assays, target cells were pre-mixed at the desired ratios prior to seeding. ˜16-18 h after target cell plating, T cells were counted, spun down at 300×g for 10 min and resuspended at 2,000 CAR(+) or Tmod(+) T cells in 25 uL complete LymphoOne media (in the absence of additional cytokines) for an effective effector:target (E:T)=1:1 (or more or less concentrated depending on the desired E:T) and gently plated on top of the target cells. For experiments including sMSLN, T cells were resuspended in LymphoOne media containing 1000 ng/mL (2×) soluble, monomeric MSLN (Acro Biosystems) for a final concentration of 500 ng/mL upon plating with target cells. Each sample was tested in triplicate wells. Within 30 min of co-culture, the plate was imaged for GFP(+) or RFP(+) target cell expression using an Incucyte imager and serial images were obtained every 2-4 h thereafter for up to 48 h. Quantification of target cell area (i.e., GFP(+) or RFP(+) total area per image) was done using Incucyte imaging software. Plating variability was accounted for by normalizing to area at time=0 per well. Killing was then quantified as the difference in area between CAR or Tmod T cell wells to corresponding untransduced T cell wells, normalized to the untrasduced T cell well (% Killing=(A_{untransduced}−A_{CAR or Tmod})/A_{untransduced}).

[0761] For HLA-A*11 blocker evaluation in primary T cells, cytotoxicity assays were performed as described above, using HeLa target cells that express native levels of MSLN and transgenic HLA-A*11 antigen.

[0762] To further assess cytokine secretion and relative T cell activation post-48 h co-culture, the T cell containing media in each well was mixed and transferred to a v-bottom plate and spun down at 400×g for 5 min. Supernatants were collected and frozen until further analysis for secreted IFN-γ using a BD Human IFN-γ flex kit as per manufacturer's instructions. Remaining T cells were then stained for human CD3, washed, and characterized for forward and side scatter by flow cytometry [35].

### Repeat Antigen-Challenge Assay (RACA) and Reversibility Assays

[0763] The RACA and reversibility assays were performed as previously described (Wang et al., in press [18]) with some modifications. Briefly, CAR or Tmod transduced primary T cells were co-cultured with MSLN(+)A*02(−) RFP(+) tumor or MSLN(+)A*02(+) GFP(+) normal target cells similarly as described above with effective E:T=1.2:1. Round 1 images were taken over the course of 48 h in a 384-well plate format. Parallel 6-well plates with 250,000 target cells and 300,000 CAR3(+) or CAR3 Tmod(+) T cells were also set up to allow for bulk T cell isolation and transfer between rounds. After 48 h, T cell containing media was gently mixed and transferred to conical tubes. Remaining T cells engaged with live target cells were further dissociated by a single 1-min rinse with 10 mM EDTA+0.5% BSA in PBS and combined with the bulk T cell fraction. These cells (along with target cell debris and lifted target cells) were then spun down, washed, and stained with a cocktail of anti-MSLN, anti-EGFR, and anti-N-cadherin PE-conjugated antibodies to stain undesirable target cells. These target cells were then conjugated to anti-PE MACS beads followed by depletion through LS columns, resulting in clean T cell fractions. T cells were then counted and re-seeded for round 2 (similarly to round 1) onto fresh tumor or normal target cells. Imaging and quantification then proceeded exactly as was done in round 1.

### MSLN Knockout Cell Line Generation

[0764] To develop MSLN(−) cell line controls for endogenous MSLN(+) cell lines, a CRISPR strategy to target full-length MSLN was utilized. Two Alt-R CRISPR-Cas9 sgRNAs targeting different exons of mesothelin were obtained from Integrated DNA Technologies (IDT), with sgRNA_1 targeting exon 2, and sgRNA_2 targeting exon 16. The sgRNAs were rehydrated in nuclease-free water and combined with Alt-R® S.p. HiFi Cas9 Nuclease V3 (IDT) to yield a 9:1 sgRNA:Cas9 mole ratio. Both RNP solutions were incubated at room temperature for 10-20 min separately to allow each of the guides to complex with Cas9 independently. The RNP complexes of both guides were subsequently combined, added to the desired cells as per the manufacturer's instructions, and electroporated. After CRISPR, cells were scaled up and sorted on the MSLN(−) population (R&D, anti-MSLN pAb or clone #618923). Bulk-sorted MSLN(−) cells were then screened against MSLN binders in Jurkat cell-based assays.

### Selectivity Screening Using Jurkat Cells

[0765] To explore off-target reactivity of MSLN CAR3 Tmod cells, Jurkat cell activation was tested against a diverse panel of target cell lines chosen to encompass the large majority of adult gene expression similarly as described elsewhere (Wang et al., in preparation). Positive controls were used to confirm that effector cells could be activated by MSLN(+) cell lines, and negative controls to set a baseline for response (see FIGS. 26B and 28A for cell line characterization). Briefly, Jurkat-NFAT-Luciferase cells were transiently transfected to express either CARs or CAR3 Tmod exactly as described above. In parallel, endogenous MSLN(+) target cells, along with their respective MSLN(−) control target cells generated using CRISPR as described above, were plated at 1e4 target cells in 15 uL complete RPMI (containing 10% FBS and 1% P/S) per well in a 384-well plate format. Approximately 18 h post-transfection, 1e4 Jurkat cells were co-cultured with each target cell and activity compared to Gen2 M5 CAR was assessed via luminescence after 6 h. Luciferase activity was measured using ONE-Step Luciferase Assay System (BPS Bioscience).

### Mouse Xenograft Study

[0766] Blinded in vivo experiments were conducted by Explora BioLabs under Institutional Animal Care and Use Committee (IACUC)-approved protocols. 5-6 week old female NOD.Cg-Prkdcscid Il2rgtm1Wj1 Tg(HLA-A/H2-D/B2M)1Dvs/SzJ (NSG-HLA-A2/HHD) mice were purchased from The Jackson Labs. Animals were acclimated to the housing environment prior to the initiation of the study. Animals (10/cohort) were implanted subcutaneously with 5e6 MS751 firefly luciferase(+) HLA-A KO tumor or renilla luciferase(+) A*02 transgenic normal cells mixed 1:1 with Matrigel in 100 uL on their right and left flanks, respectively, in half of the mice in each cohort, and vice versa in the other half to control for flank growth variation. When tumors reached an average of 100-150 mm³ each (V=L×W×W/2), animals were randomized into 5 groups (n=10) and 2e7 T cells, or saline control, were administered via the tail vein. Prior to injection, T cells were ˜60% CAR(+) or Tmod(+). Post T cell injection, graft measurements by calipers were performed 3× times per week and BLI 1× time per week for the duration of the study. At each BLI session, RediJect Coelenterazine h substrate (PerkinElmer) was first injected to visualize renilla luciferase(+) normal cells, followed by injection of XenoLight D-Luciferin Potassium Salt (PerkinElmer) 6 h later to visualize firefly luciferase(+) tumor cells on the reverse flank.

### CRISPR Knockout of B2M in Primary T Cells

[0767] Frozen PBMCs were thawed and activated as described above. Transductions were performed 24 h post-activation using lentivirus (Alstem) at MOI 10. 24 h post-transduction, primary T cells were transfected with CRISPR-Cas9:sgRNA complexes. Briefly, cells were collected and washed with PBS before resuspending in supplemented P3 nucleofection buffer (Lonza). 20 pmol of Cas9 (Synthego) was combined with 130 pmol B2M-targeting sgRNA (Synthego) and incubated in P3 nucleofection buffer before addition to cells. 20 uL of the cell and ribonucleoprotein (RNP) mixture was transferred to a 16-well Nucleocuvette Strip and electroporated with the 4D nucleofector using the stimulated T cell program (EO-115). The cells were recovered in 100 uL of prewarmed media, X-VIVO 15 (Lonza) supplemented with 5% HIA human AB serum and 300 IU/mL IL-2. PBMCs were cultured and expanded in LymphoONE Tcell Expansion Medium (Takara Bio) supplemented with 1% HIA human AB serum and 300 IU/mL IL-2 for 6 days. Post expansion, positively transduced primary T cells were enriched using anti-PE microbeads (Miltenyi) according to manufacturer's instructions against Protein L-biotin: streptavidin-PE using LS column. Cytotoxicity of B2M KO primary T cells was then assessed exactly as described above.

### Statistical Analysis

[0768] Statistical analyses were performed using GraphPad Prism software. All Jurkat cell-based in vitro studies (including mRNA titration experiments) are shown as mean±standard deviation (SD) of technical replicates, while primary T cell-based in vitro studies are shown as mean±SD of technical triplicates. Where applicable, technical replicates are shown as individual data points, with bars denoting means. All data is representative of a minimum of n=2 experimental repeats, unless otherwise noted. Data for in vivo studies are shown as mean±standard error of the mean (SEM). For mRNA titration studies, curves were fit using a four-parameter non-linear regression analysis. EC₅₀ and IC₅₀ values were calculated directly from the curves. Direct comparisons were analyzed using unpaired, parametric t tests, unless otherwise noted.

### REFERENCES

[0769] 1 Chang, K., Pai, L. H., Batra, J. K., Pastan, I. & Willingham, M. C. Characterization of the antigen (CAK1) recognized by monoclonal antibody K1 present on ovarian cancers and normal mesothelium. Cancer Res 52, 181-186 (1992).
[0770] 2 Hassan, R. et al. Mesothelin Immunotherapy for Cancer: Ready for Prime Time? J Clin Oncol 34, 4171-4179, doi:10.1200/JCO.2016.68.3672 (2016).
[0771] 3 Bera, T. K. & Pastan, I. Mesothelin is not required for normal mouse development or reproduction. Mol Cell Biol 20, 2902-2906, doi:10.1128/MCB.20.8.2902-2906.2000 (2000).
[0772] 4 O'Hara, M. H., Stashwick, C., Plesa, G. & Tanyi, J. L. Overcoming barriers of car T-cell therapy in patients with mesothelin-expressing cancers. Immunotherapy 9, 767-780, doi:10.2217/imt-2017-0026 (2017).
[0773] 5 Chowdhury, P. S., Viner, J. L., Beers, R. & Pastan, I. Isolation of a high-affinity stable single-chain Fv specific for mesothelin from DNA-immunized mice by phage display and construction of a recombinant immunotoxin with anti-tumor activity. Proc Natl Acad Sci USA 95, 669-674, doi:10.1073/pnas.95.2.669 (1998).
[0774] 6 Hassan, R. et al. Phase I study of SS1P, a recombinant anti-mesothelin immunotoxin given as a bolus I.V. infusion to patients with mesothelin-expressing mesothelioma, ovarian, and pancreatic cancers. Clin Cancer Res 13, 5144-5149, doi:10.1158/1078-0432.CCR-07-0869 (2007).
[0775] 7 Golfier, S. et al. Anetumab ravtansine: a novel mesothelin-targeting antibody-drug conjugate cures tumors with heterogeneous target expression favored by bystander effect. Mol Cancer Ther 13, 1537-1548, doi:10.1158/1535-7163.MCT-13-0926 (2014).
[0776] 8 Luke, J. J. et al. Phase I study of ABBV-428, a mesothelin-CD40 bispecific, in patients with advanced solid tumors. J Immunother Cancer 9, doi:10.1136/jitc-2020-002015 (2021).
[0777] 9 Beatty, G. L. et al. Activity of Mesothelin-Specific Chimeric Antigen Receptor T Cells Against Pancreatic Carcinoma Metastases in a Phase 1 Trial. Gastroenterology 155, 29-32, doi:10.1053/j.gastro.2018.03.029 (2018).
[0778] 10 Ding, J. et al. Abstract 2307: Preclinical evaluation of TC-210, a mesothelin-specific T cell receptor (TCR) fusion construct (TRuC™) T cells for the treatment of solid tumors. Cancer Research 79, 2307-2307, doi:10.1158/1538-7445.Am2019-2307 (2019).
[0779] 11 Adusumilli, P. S. et al. Regional delivery of mesothelin-targeted CAR T cells for pleural cancers: Safety and preliminary efficacy in combination with anti-PD-1 agent. Journal of Clinical Oncology 37, 2511-2511, doi:10.1200/JCO.2019.37.15_suppl.2511 (2019).
[0780] 12 Feng, Y. et al. A novel human monoclonal antibody that binds with high affinity to mesothelin-expressing cells and kills them by antibody-dependent cell-mediated cytotoxicity. Mol Cancer Ther 8, 1113-1118, doi:10.1158/1535-7163.MCT-08-0945 (2009).
[0781] 13 Klampatsa, A., Dimou, V. & Albelda, S. M. Mesothelin-targeted CAR-T cell therapy for solid tumors. Expert Opin Biol Ther 21, 473-486, doi:10.1080/14712598.2021.1843628 (2021).
[0782] 14 Tanyi, J. L. et al. Possible Compartmental Cytokine Release Syndrome in a Patient With Recurrent Ovarian Cancer After Treatment With Mesothelin-targeted CAR-T Cells. J Immunother 40, 104-107, doi:10.1097/CJI.0000000000000160 (2017).
[0783] 15 James, S. E. et al. Mathematical modeling of chimeric TCR triggering predicts the magnitude of target lysis and its impairment by TCR downmodulation. J Immunol 184, 4284-4294, doi:10.4049/jimmunol.0903701 (2010).
[0784] 16 Xu, H. et al. Structure-function relationships of chimeric antigen receptors in acute T cell responses to antigen. Mol Immunol 126, 56-64, doi:10.1016/j.molimm.2020.07.020 (2020).
[0785] 17 Smith, K. B. & Ellis, S. A. Standardisation of a procedure for quantifying surface antigens by indirect immunofluorescence. J Immunol Methods 228, 29-36, doi:10.1016/s0022-1759(99)00087-3 (1999).
[0786] 18 Hamburger, A. E. et al. Engineered T cells directed at tumors with defined allelic loss. Mol Immunol 128, 298-310, doi:10.1016/j.molimm.2020.09.012 (2020).
[0787] 19 Hassan, R. et al. Phase 1 study of the antimesothelin immunotoxin SS1P in combination with pemetrexed and cisplatin for front-line therapy of pleural mesothelioma and correlation of tumor response with serum mesothelin, megakaryocyte potentiating factor, and cancer antigen 125. Cancer 120, 3311-3319, doi:10.1002/cncr.28875 (2014).
[0788] 20 Gragert, L., Madbouly, A., Freeman, J. & Maiers, M. Six-locus high resolution HLA haplotype frequencies derived from mixed-resolution DNA typing for the entire US donor registry. Hum Immunol 74, 1313-1320, doi:10.1016/j.humimm.2013.06.025 (2013).
[0789] 21 Fedorov, V. D., Themeli, M. & Sadelain, M. PD-1- and CTLA-4-based inhibitory chimeric antigen receptors divert off-target immunotherapy responses. Sci Transl Med 5, 215ra172, doi:10.1126/scitranslmed.3006597 (2013).
[0790] 22 Hwang, M. S. et al. Targeting loss of heterozygosity for cancer-specific immunotherapy. Proc Natl Acad Sci USA 118, doi:10.1073/pnas.2022410118 (2021).
[0791] 23 Roex, G. et al. Chimeric Antigen Receptor-T-Cell Therapy for B-Cell Hematological Malignancies: An Update of the Pivotal Clinical Trial Data. Pharmaceutics 12, doi:10.3390/pharmaceutics12020194 (2020).
[0792] 24 Mastrogiovanni, M., Juzans, M., Alcover, A. & Di Bartolo, V. Coordinating Cytoskeleton and Molecular Traffic in T Cell Migration, Activation, and Effector Functions. Front Cell Dev Biol 8, 591348, doi:10.3389/fcell.2020.591348 (2020).
[0793] 25 Lopez, S. et al. Interplay between whole-genome doubling and the accumulation of deleterious alterations in cancer evolution. Nat Genet 52, 283-293, doi:10.1038/s41588-020-0584-7 (2020).
[0794] 26 Foo, J. & Michor, F. Evolution of acquired resistance to anti-cancer therapy. J Theor Biol 355, 10-20, doi:10.1016/j.jtbi.2014.02.025 (2014).
[0795] 27 Beaubier, N. et al. Clinical validation of the tempus xT next-generation targeted oncology sequencing assay. Oncotarget 10, 2384-2396, doi:10.18632/oncotarget.26797 (2019).
[0796] 28 Consortium, I. T. P.-C. A. o. W. G. Pan-cancer analysis of whole genomes. Nature 578, 82-93, doi:10.1038/s41586-020-1969-6 (2020).
[0797] 29 Ford, L., Wolford, J. E., Brown, S. M. & Randall, L. M. A profile on the FoundationFocus CDxBRCA tests. Expert Rev Mol Diagn 20, 285-292, doi:10.1080/14737159.2020.1701438 (2020).
[0798] 30 Beroukhim, R. et al. The landscape of somatic copy-number alteration across human cancers. Nature 463, 899-905, doi:10.1038/nature08822 (2010).
[0799] 31 Gold, P. & Freedman, S. O. Specific carcinoembryonic antigens of the human digestive system. J Exp Med 122, 467-481, doi:10.1084/jem.122.3.467 (1965).
[0800] 32 Parham, P. & Bodmer, W. F. Monoclonal antibody to a human histocompatibility alloantigen, HLA-A2. Nature 276, 397-399, doi:10.1038/276397a0 (1978).
[0801] 33. Tanyi, J. L. et al. Possible Compartmental Cytokine Release Syndrome in a Patient With Recurrent Ovarian Cancer After Treatment With Mesothelin-targeted CAR-T Cells. J Immunother 40, 104-107 (2017).
[0802] 34. Montesion, M. et al. Somatic HLA Class I Loss Is a Widespread Mechanism of Immune Evasion Which Refines the Use of Tumor Mutational Burden as a Biomarker of Checkpoint Inhibitor Response. Cancer Discov 11, 282-292 (2021).
[0803] 35. Bohmer et al., Forward light scatter is a simple measure of T-cell activation and proliferation but is not universally suited for doublet discrimination. Cytometry 79A(8):646-652 (2011).
[0804] 36. Berger et al. Monoclonal antibody to HLA-A3. Hybridoma 1(2):87-90 (1982).
[0805] 37. Brodsky et al., Monoclonal antibodies for analysis of the HLA system. Immunol Rev.
[0806] 47:3-61 (1979).

What is claimed is:

1. An immune cell comprising:
a. a first receptor, comprising an extracellular ligand binding domain specific to Mesothelin (MSLN); and
b. a second receptor, comprising an extracellular ligand binding domain specific to a non-target antigen lost in a MSLN+ cancer cell,
wherein the first receptor is an activator receptor responsive to MSLN; and wherein the second receptor is an inhibitory receptor responsive to the non-target antigen.

2. The immune cell of claim 1, wherein the non-target antigen is lost in the MSLN+ cancer cell through loss of heterozygosity.

3. The immune cell of claim 1 or 2, wherein the extracellular ligand binding domain of the second receptor specifically binds an allelic variant of a major histocompatibility complex (MHC) protein.

4. The immune cell of any one of claims 1-3, wherein the extracellular ligand binding domain of the second receptor specifically binds an allelic variant of an HLA-A, HLA-B, or HLA-C protein.

5. The immune cell of any one of claims 1-4, wherein the extracellular ligand binding domain of the second receptor specifically binds to HLA-A*01, HLA-A*02, HLA-A*03, HLA-A*11, HLA-B*07, or HLA-C*07.

6. The immune cell of claim 5, wherein the extracellular ligand binding domain of the second receptor specifically binds to HLA-A*02.

7. The immune cell of any one of claims 1-6, wherein the extracellular ligand binding domain of the second receptor comprises complementarity determining regions (CDRs) CDR-L1, CDR-L2, CDR-L3, CDR-H1, CDR-H2, CDR-H3 as disclosed Table 6; or CDR sequences having at most 1, 2, or 3 substitutions, deletions, or insertion relative to the CDRs of Table 6 or Table 7.

8. The immune cell of any one of claims 1-6, wherein the extracellular ligand binding domain of the second receptor comprises complementarity determining regions (CDRs) CDR-L1, CDR-L2, CDR-L3, CDR-H1, CDR-H2, CDR-H3 of SEQ ID NOS: 42-47 or of SEQ ID NOS: 48-53; or CDR sequences having at most 1, 2, or 3 substitutions, deletions, or insertion relative to the CDRs of SEQ ID NOS: 42-47 or SEQ ID NOS: 48-53.

9. The immune cell of any one of claims 1-6, wherein the extracellular ligand binding domain of the second receptor comprises a polypeptide sequence selected from the polypeptide sequence disclosed in Table 5; or a sequence having at least 85%, at least 90%, at least 95%, at least 97% or at least 99% identity thereto.

10. The immune cell of any one of claims 1-6, wherein the extracellular ligand binding domain of the second receptor comprises any one of SEQ ID NOS: 30-41, or a sequence having at least 85%, at least 90%, at least 95%, at least 97% or at least 99% identity thereto.

11. The immune cell of any one of claims 1-10, wherein the first receptor is a chimeric antigen receptor (CAR).

12. The immune cell of any one of claims 1-11, wherein the extracellular ligand binding domain of the first receptor comprises complementarity determining regions (CDRs) CDR-L1, CDR-L2, CDR-L3, CDR-H1, CDR-H2, CDR-H3 as disclosed Table 2; or CDR sequences having at most 1, 2, or 3 substitutions, deletions, or insertions relative to the CDRs of Table 2.

13. The immune cell of any one of claims 1-11, wherein the extracellular ligand binding domain of the first receptor comprises a variable heavy (VH) portion comprising a sequence set forth in Table 3 and a variable light (VL) portion comprising a sequence set forth in Table 4; or a sequence having at least 80%, at least 90%, at least 95%, at least 97% or at least 99% identity thereto.

14. The immune cell of any one of claims 1-13, wherein the extracellular ligand binding domain of the first receptor comprises a variable heavy (VH) portion comprising SEQ ID NO: 233 or a sequence having at least 85%, at least 90%, at least 95%, at least 97%, or at least 99% identity thereto, and a variable light (VL) portion comprising SEQ ID NO: 279 or a sequence having 85%, at least 90%, at least 95%, at least 97%, or at least 99% identity thereto.

15. The immune cell of any one of claims 1-13, wherein the extracellular ligand binding domain of the first receptor comprises a sequence selected from the group consisting of SEQ ID NOS: 3-6, 80 and 154-215, or a sequence having at least 85%, at least 90%, at least 95%, at least 97%, or at least 99% identity thereto.

16. The immune cell of any one of claims 1-13, wherein the extracellular ligand binding domain of the first receptor comprises an scFv sequence of SEQ ID NO: 171; or a sequence having at least 85%, at least 90%, at least 95%, at least 97% or at least 99% identity thereto.

17. The immune cell of any one of claims 1-16, wherein the first receptor comprises a hinge domain, a transmembrane domain and an intracellular domain.

18. The immune cell of claim 17, wherein the hinge domain comprises a CD8α hinge domain.

19. The immune cell of claim 18, wherein the CD8α hinge domain comprises a sequence of SEQ ID NO: 7, or a sequence having at least 85%, at least 90%, at least 95%, at least 97% or at least 99% identity thereto.

20. The immune cell of any one of claims 11-19, wherein the transmembrane domain comprises a CD28 transmembrane domain.

21. The immune cell of claim 20, wherein the CD28 transmembrane domain comprises a sequence of SEQ ID NO: 11, or a sequence having at least 85%, at least 90%, at least 95%, at least 97% or at least 99% identity thereto.

22. The immune cell of any one of claims 11-21, wherein the intracellular domain comprises a CD28 co-stimulatory domain, a 4-1BB co-stimulatory domain, and a CD3ζ activation domain.

23. The immune cell of claim 22, wherein the intracellular domain comprises a sequence of SEQ ID NO: 285, or a sequence having at least 85%, at least 90%, at least 95%, at least 97% or at least 99% identity thereto.

24. The immune cell of any one of claims 1-23, wherein the first receptor comprises a sequence of SEQ ID NO: 303, or a sequence having at least 90%, at least 95%, at least 97% or at least 99% identity thereto.

25. The immune cell of any one of claims 1-24, wherein the second receptor comprises a LILRB1 intracellular domain or a functional variant thereof.

26. The immune cell of claim 25, wherein the LILRB1 intracellular domain comprises a sequence at least 90%, at least 95%, at least 97%, at least 99%, or is identical to SEQ ID NO: 70.

27. The immune cell of any one of claims 1-26, wherein the second receptor comprises a LILRB1 transmembrane domain or a functional variant thereof.

28. The immune cell of claim 27, wherein the LILRB1 transmembrane domain or a functional variant thereof comprises a sequence at least 90%, at least 95%, at least 97%, at least 99% or is identical to SEQ ID NO: 74.

29. The immune cell of any one of claims 1-28, wherein the second receptor comprises a LILRB1 hinge domain or functional variant thereof.

30. The immune cell of claim 29, wherein the LILRB1 hinge domain comprises a sequence at least 90%, at least 95%, at least 97%, at least 99% or is identical to SEQ ID NO: 73.

31. The immune cell of any one of claims 1-30, wherein the second receptor comprises a LILRB1 intracellular domain, a LILRB1 transmembrane domain, a LILRB1 hinge domain, a functional variant of any of these, or combinations thereof.

32. The immune cell of claim 31, wherein the LILRB1 hinge domain, LILRB1 intracellular domain and LILRB1 transmembrane domain comprises SEQ ID NO: 71 or a sequence at least 90%, at least 95%, at least 97%, at least 99% or is identical to SEQ ID NO: 71.

33. The immune cell of any one of claims 1-32, wherein the second receptor comprises a sequence of SEQ ID NO: 348, or a sequence having at least 90%, at least 95%, at least 97%, or at least 99% identity thereto.

34. The immune cell of any one of claims 1-33, wherein the MSLN+ cancer cell is a mesothelioma cancer cell, an ovarian cancer cell, a cervical cancer cell, a colorectal cancer cell, an esophageal cancer cell, a head and neck cancer cell, a kidney cancer cell, an uterine cancer cell, a gastric cancer cell, a pancreatic cancer cell, a lung cancer cell, a colorectal cancer cell or a cholangiocarcinoma cell.

35. The immune cell of claim 34, wherein the MSLN+ cancer cell is a mesothelioma cancer cell, an ovarian cancer cell, a cervical cell, a uterine cancer cell, a gastric cancer cell, a pancreatic cancer cell or a lung adenocarcinoma cell.

36. The immune cell of any one of claims 1-35, wherein the MSLN+ cancer cell is a MSLN+/HLA-A*02− cancer cell that does not express HLA-A*02.

37. The immune cell of claim 36, wherein the MSLN+/HLA-A*02− cancer cell is derived from a MSLN+/HLA-A*02+ cell by loss of heterozygosity at HLA-A leading to loss of HLA-A*02.

38. The immune cell of any one of claims 1-37, wherein the first receptor and the second receptor together specifically activate the immune cell in the presence of the MSLN+/HLA-A*02− cancer cell having loss of heterozygosity.

39. The immune cell of any one of claims 1-38, wherein the first receptor and the second receptor together do not specifically activate the immune cell in the presence of an MSLN+ cell that has not lost HLA-A*02 by loss of heterozygosity.

40. The immune cell of any one of claims 1-39, wherein the immune cell is a T cell.

41. The immune cell of claim 40, wherein the T cell is a CD8+CD4− T cell.

42. The immune cell of any one of claims 1-41, wherein expression and/or function of a MHC Class I gene has been reduced or eliminated.

43. The immune cell of claim 42, wherein the MHC Class I gene is beta-2-microglobulin (B2M).

44. The immune cell of claim 43, further comprising a polynucleotide comprising an interfering RNA, the interfering RNA comprising a sequence complementary to a sequence of a B2M mRNA.

45. The immune cell of claim 44, wherein the interfering RNA comprises a sequence selected from the group of sequences set forth in Table 13, or a sequence having at most 1, 2, 3, or 4 substitutions, insertions or deletions relative thereto.

46. The immune cell of claim 44 or 45, wherein the interfering RNA is capable of inducing RNAi-mediated degradation of the B2M mRNA.

47. The immune cell of claim 46, wherein the interfering RNA is a short hairpin RNA (shRNA).

48. The immune cell of claim 47, wherein the shRNA comprises:
a. a first sequence, having from 5′ end to 3′ end a sequence complementary to a sequence of the B2M mRNA; and
b. a second sequence, having from 5′ end to 3′ end a sequence complementary to the first sequence,
wherein the first sequence and the second sequence form the shRNA.

49. The immune cell of claim 47 or 48, wherein the shRNA is encoded by a sequence comprising a sequence of GCACTCAAAGCTTGTTAAGATCGAAATCTTAACAAGCTTTGAGTGC (SEQ ID NO: 349) or GTTAACTTCCAATTTACATACCGAAGTATGTAAATTGGAAGTTAAC (SEQ ID NO: 350), or a sequence having at least 80%, at least 90%, or at least 95% identity thereto.

50. The immune cell of claim 43, comprising one or more modifications to a sequence encoding B2M, wherein the one or more modifications reduce the expression and/or eliminate the function of B2M.

51. The immune cell of claim 50, wherein the one or more modifications comprise one or more inactivating mutations of the endogenous gene encoding B2M.

52. The immune cell of claim 51, wherein the one or more inactivating mutations comprise a deletion, an insertion, a substitution, or a frameshift mutation.

53. The immune cell of any one of claim 51 or 52, wherein the one or more inactivating mutations are introduced with a nucleic acid guided endonuclease in a complex with at least one guide nucleic acid (gNA) that specifically targets a sequence of the endogenous gene encoding B2M.

54. The immune cell of claim 53, wherein the gNA comprises a sequence selected from the group of sequences set forth in Table 12, or a sequence having at most 1, 2, 3, or 4 substitutions, insertions or deletions relative thereto.

55. The immune cell of claim 42, wherein the MHC Class I gene is HLA-A*02.

56. The immune cell of claim 55, further comprising a polynucleotide comprising an interfering RNA, comprising a sequence complementary to a sequence of an HLA-A*02 mRNA.

57. The immune cell of claim 56, wherein the interfering RNA is capable of inducing RNA interference (RNAi)-mediated degradation of the HLA-A*02 mRNA.

58. The immune cell of claim 57, wherein the interfering RNA is a short hairpin RNA (shRNA) comprising:
a. a first sequence, having from 5′ end to 3′ end a sequence complementary to a sequence of the HLA-A*02 mRNA; and
b. a second sequence, having from 5′ end to 3′ end a sequence complementary to the first sequence,
wherein the first sequence and the second sequence form the shRNA.

59. The immune cell of claim 55, comprising one or more modifications to a sequence of an endogenous gene encoding HLA-A*02, wherein the one or modifications reduce the expression and/or eliminate the function of HLA-A*02.

60. The immune cell of claim 59, wherein the one or more modifications comprise one or more inactivating mutations of the endogenous gene encoding HLA-A*02.

61. The immune cell of claim 59 or 60, wherein the one or more inactivating mutations are introduced with a nucleic acid guided endonuclease in a complex with at least one guide nucleic acid (gNA) that specifically targets a sequence of the endogenous gene encoding HLA-A*02.

62. The immune cell of any one of claims 1-61, wherein the first receptor comprises a sequence of SEQ ID NO: 164, and the second receptor comprises a sequence of SEQ ID NO: 52, or sequences having at least 90%, at least 95%, at least 97% or at least 99% identity thereto.

63. The immune cell of claim 62, comprising an shRNA encoded by a sequence comprising GCACTCAAAGCTTGTTAAGATCGAAATCTTAACAAGCTTTGAGTGC (SEQ ID NO: 349) or GTTAACTTCCAATTTACATACCGAAGTATGTAAATTGGAAGTTAAC (SEQ ID NO: 350) or a sequence having at least 80%, at least 90%, or at least 95% identity thereto.

64. The immune cell of claim 62 or 63, wherein the first receptor and second receptor are encoded by a single polynucleotide, and wherein the sequences encoding the first and second receptors are separated by a sequence encoding a self-cleaving polypeptide.

65. The immune cell of claim 63, wherein the self-cleaving polypeptide comprises a T2A self-cleaving polypeptide comprising a sequence of GSGEGRGSLLTCGDVEENPGP (SEQ ID NO: 351).

66. The immune cell of any one of claims 1-65, wherein the immune cell is autologous.

67. The immune cell of any one of claims 1-65, wherein the immune cell is allogeneic.

68. A pharmaceutical composition, comprising a therapeutically effective amount of the immune cells of any one of claims 1-67.

69. The pharmaceutical composition of claim 68, further comprising a pharmaceutically acceptable carrier, diluent or excipient.

70. The pharmaceutical composition of claim 68 or 69, for use as a medicament in the treatment of MSLN+ cancer.

71. A polynucleotide or polynucleotide system, comprising one or more polynucleotides comprising polynucleotide sequences encoding:
a. a first receptor, comprising an extracellular ligand binding domain specific to Mesothelin (MSLN); and
b. a second receptor, comprising an extracellular ligand binding domain specific to a non-target antigen that has been lost in a MSLN+ cancer cell,
wherein the first receptor is an activator receptor responsive to MSLN on the MSLN+ cancer cell; and wherein the second receptor is an inhibitory receptor responsive to the non-target antigen.

72. A polynucleotide or polynucleotide system, comprising one or more polynucleotides comprising polynucleotide sequences encoding the first receptor and the second receptor for use in generating the immune cells of any one of claims 1-67.

73. The polynucleotide or polynucleotide system of claim 71 or 72, comprising a sequence encoding an shRNA specific to B2M.

74. The polynucleotide or polynucleotide system of claim 73, wherein the sequences encoding the first receptor, the second receptor and the shRNA specific to B2M are encoded by the same polynucleotide.

75. The polynucleotide or polynucleotide system of claim 73 or 74, wherein
a. the sequence encoding the shRNA specific to B2M comprises GCACTCAAAGCTTGTTAAGATCGAAATCTTAACAAGCTTTGAGTGC (SEQ ID NO: 349) or GTTAACTTCCAATTTACATACCGAAGTATGTAAATTGGAAGTTAAC (SEQ ID NO: 350) or a sequence having at least 80%, at least 90%, or at least 95% identity thereto;
b. the sequence encoding the first receptor comprises a sequence encoding a polypeptide comprising a of SEQ ID NO: 303, or a sequence having at least 80%, at least 90%, or at least 95% identity thereto; and
c. the sequence encoding the second receptor comprises a sequence encoding a polypeptide comprising a sequence of SEQ ID NO: 348, or a sequence having at least 80%, at least 90%, or at least 95% identity thereto.

76. A vector, comprising the one or more polynucleotides of any one of claims 71-75.

77. A method of killing a MSLN+ cancer cell having loss of heterozygosity at an MHC class I locus, comprising administering to the subject an effective amount of the immune cell of any one of claims 1-65 or the pharmaceutical composition of any one of claims 66-68.

78. A method of treating MSLN+ cancer in a subject having a MSLN+ tumor having loss of heterozygosity at an MHC class I locus, comprising administering to the subject an effective amount of the immune cell of any one of claims 1-67 or the pharmaceutical composition of any one of claims 68-70.

79. A method of treating a cancer in a subject comprising:
a. determining HLA-A genotype or expression of normal cells and a plurality of cancer cells of the subject;
b. optionally, determining the expression of MSLN in a plurality of cancer cells of the subject; and
c. administering to the subject an effective amount of the immune cell of any one of claims 1-65 or the pharmaceutical composition of any one of claims 66-68 if the normal cells express HLA-A*02 and the plurality of cancer cells do not express HLA-A*02, and the plurality of cancer cells are MSLN-positive.

80. The method of claim 79, wherein the subject is a heterozygous HLA-A*02 patient with a malignancy that expresses MSLN (MSLN+) and has lost HLA-A*02 expression.

81. The method of claim 79, wherein the subject is a heterozygous HLA-A*02 patient with recurrent unresectable or metastatic solid tumors that express MSLN and have lost HLA-A*02 expression.

82. The method of any one of claims 79-81, wherein the cancer comprises mesothelioma cancer, ovarian cancer, cervical cancer, colorectal cancer, esophageal cancer, head and neck cancer, kidney cancer, uterine cancer, gastric cancer, pancreatic cancer, lung cancer, colorectal cancer, or cholangiocarcinoma.

83. The method of any one of claim 82, wherein the cancer has relapsed in a subject, the cancer is refractory to one or more prior administered anticancer therapies, and/or the cancer is metastatic.

84. The method of any one of claims 79-83, wherein the cancer cells comprise MSLN+/HLA-A*02− cancer cells that do not express HLA-A*02.

85. The method of claim 84, wherein the MSLN+/HLA-A*02− cancer cells are derived from a MLSN+/HLA-A*02+ cell by loss of heterozygosity at HLA-A leading to loss of HLA-A*02.

86. The method of any one of claims 79-85, wherein the first receptor and the second receptor together specifically activate the immune cell in the presence of the MSLN+/HLA-A*02-cancer cells.

87. The method of any one of claims 79-86, wherein the first receptor and the second receptor together do not specifically activate the immune cell in the presence of a MSLN+ cell that has not lost HLA-A*02.

88. The method of any one of claims 79-87, wherein administration of the immune cell of any one of claims 1-58 or the pharmaceutical composition of any one of claims 59-61 reduces the size of a tumor in the subject.

89. The method of claim 88, wherein the tumor is reduced by about 5%, about 10%, about 15%, about 20%, about 25%, about 30%, about 35%, about 40%, about 45%, about 50%, about 55%, about 60%, about 65%, about 70%, about 75%, about 80%, about 85%, about 90%, about 95%, or about 100%.

90. The method of claim 88, wherein the tumor is eliminated.

91. The method of claim 88 or claim 89, wherein administration of the immune cell or the pharmaceutical composition arrests the growth of a tumor in the subject.

92. The method of any one of claims 79-91, wherein administration of the immune cell or the pharmaceutical composition reduces the number of tumors in the subject.

93. The method of any one of claims 79-92, wherein administration of the immune cell or the pharmaceutical composition results in selective killing of a cancer cell but not a normal cell in the subject.

94. The method of claim 93, wherein at least about 60% of the cells killed are cancer cells, about 65% of the cells killed are cancer cells, about 70% of the cells killed are cancer cells, about 75% of the cells killed are cancer cells, about 80% of the cells killed are cancer cells, about 85% of the cells killed are cancer cells, about 90% of the cells killed are cancer cells, about 95% of the cells killed are cancer cells, or about 100% of the cells killed are cancer cells.

95. The method of claim 93, wherein administration of the immune cell or pharmaceutical composition results in the killing of at least about 40%, about 50%, about 60%, about 70%, about 80%, about 90% or all of the cancer cells of the subject.

96. The method of any one of claims 79-95, wherein administration of the immune cell or the pharmaceutical composition results in fewer side effects for the subject than administration of an otherwise equivalent immune cell comprising the first activator receptor but no second inhibitory receptor.

97. A method of making a plurality of immune cells, comprising:
a. providing a plurality of immune cells, and
b. transforming the plurality of immune cells with the polynucleotide system of any one of claim 71-75, or the vector of claim 76.

98. A kit comprising the immune cell of any one of claims 1-67 or the pharmaceutical composition of any one of claims 68-708.

99. The kit of claim 98, further comprising instructions for use.

The application's sequence listing, which the Patent Office published only in electronic form, follows.

SEQUENCE LISTING (1255 sequences)

SEQ ID NO: 1 - protein, 622 aa, Homo sapiens
MALPTARPLLGSCGTPALGSLLFLLFSLGWVQPSRTLAGETGQEAAPLDGVLANPPNISSLSPRQLLGFPCAEVSGLSTERVRELAVALAQKNVKLSTEQLRCLAHRLSEPPEDLDALPLDLLLFLNPDAFSGPQACTRFFSRITKANVDLLPRGAPERQRLLPAALACWGVRGSLLSEADVRALGGLACDLPGRFVAESAEVLLPRLVSCPGPLDQDQQEAARAALQGGGPPYGPPSTWSVSTMDALRGLLPVLGQPIIRSIPQGIVAAWRQRSSRDPSWRQPERTILRPRFRREVEKTACPSGKKAREIDESLIFYKKWELEACVDAALLATQMDRVNAIPFTYEQLDVLKHKLDELYPQGYPESVIQHLGYLFLKMSPEDIRKWNVTSLETLKALLEVNKGHEMSPQVATLIDRFVKGRGQLDKDTLDTLTAFYPGYLCSLSPEELSSVPPSSIWAVRPQDLDTCDPRQLDVLYPKARLAFQNMNGSEYFVKIQSFLGGAPTEDLKALSQQNVSMDLATFMKLRTDAVLPLTVAEVQKLLGPHVEGLKAEERHRPVRDWILRQRQDDLDTLGLGLQGGIPNGYLVLDLSMQEALSGTPCLLGPGPVLTVLALLLASTLA

SEQ ID NO: 2 - protein, 630 aa, Homo sapiens
MALPTARPLLGSCGTPALGSLLFLLFSLGWVQPSRTLAGETGQEAAPLDGVLANPPNISSLSPRQLLGFPCAEVSGLSTERVRELAVALAQKNVKLSTEQLRCLAHRLSEPPEDLDALPLDLLLFLNPDAFSGPQACTRFFSRITKANVDLLPRGAPERQRLLPAALACWGVRGSLLSEADVRALGGLACDLPGRFVAESAEVLLPRLVSCPGPLDQDQQEAARAALQGGGPPYGPPSTWSVSTMDALRGLLPVLGQPIIRSIPQGIVAAWRQRSSRDPSWRQPERTILRPRFRREVEKTACPSGKKAREIDESLIFYKKWELEACVDAALLATQMDRVNAIPFTYEQLDVLKHKLDELYPQGYPESVIQHLGYLFLKMSPEDIRKWNVTSLETLKALLEVNKGHEMSPQAPRRPLPQVATLIDRFVKGRGQLDKDTLDTLTAFYPGYLCSLSPEELSSVPPSSIWAVRPQDLDTCDPRQLDVLYPKARLAFQNMNGSEYFVKIQSFLGGAPTEDLKALSQQNVSMDLATFMKLRTDAVLPLTVAEVQKLLGPHVEGLKAEERHRPVRDWILRQRQDDLDTLGLGLQGGIPNGYLVLDLSMQEALSGTPCLLGPGPVLTVLALLLASTLA

SEQ ID NO: 3 - protein, 237 aa, synthetic construct
  REGION 1..237: note = MSLN scFv domain
QVQLVQSGAEVEKPGASVKVSCKASGYTFTDYYMHWVRQAPGQGLEWMGWINPNSGGTNYAQKFQGRVTMTRDTSISTAYMELSRLRSDDTAVYYCASGWDFDYWGQGTLVTVSSGGGGSGGGGSGGGGSGGDIVMTQSSSLSASVGDRVTITCRASQSIRYYLSWYQQKPGKAPKLLIYTASILQNGVPSRFSGSGSGTDFTLTISSLQPEDFATYYCLQTYTTPDFGPGTKVEIK

SEQ ID NO: 4 - protein, 246 aa, synthetic construct
  REGION 1..246: note = MSLN scFv domain
QVQLVQSGAEVRAPGASVKISCKASGFTFRGYYIHWVRQAPGQGLEWMGIINPSGGSRAYAQKFQGRVTMTRDTSTSTVYMELSSLRSDDTAMYYCARTASCGGDCYYLDYWGQGTLVTVSSGGGGSGGGGSGGGGSGGDIQMTQSPPTLSASVGDRVTITCRASENVNIWLAWYQQKPGKAPKLLIYKSSSLASGVPSRFSGSGSGAEFTLTISSLQPDDFATYYCQQYQSYPLTFGGGTKVEIK

SEQ ID NO: 5 - protein, 242 aa, synthetic construct
  REGION 1..242: note = MSLN scFv domain
QVQLVQSGAEVKKPGASVKVSCKASGYSFTGYTMNWVRQAPGQRLEWMGLITPYNGASSYNQKFRGRVTITRDTSASTAYMELSSLRSEDTAVYYCARGGYDGRGFDYWGQGTTVTVSSGGGGSGGGGSGGGGSGGDIQMTQSPSSLSASVGDRVTITCSASSSVSYMHWYQQKPGKAPKRLIYDTSKLASGVPSRFSGSGSGTEFTLTISSLQPEDFATYYCQQWSGYPLTFGQGTKLEIK

SEQ ID NO: 6 - protein, 242 aa, synthetic construct
  REGION 1..242: note = MSLN scFv domain
QVQLQQSGPELEKPGASVKISCKASGYSFTGYTMNWVKQSHGKSLEWIGLITPYNGASSYNQKFRGKATLTVDKSSSTAYMDLLSLTSEDSAVYFCARGGYDGRGFDYWGQGTTVTVSSGGGGSGGGGSGGGGSGGDIELTQSPAIMSASPGEKVTMTCSASSSVSYMHWYQQKSGTSPKRWIYDTSKLASGVPGRFSGSGSGNSYSLTISSVEAEDDATYYCQQWSGYPLTFGAGTKLEIK

SEQ ID NO: 7 - protein, 45 aa, unidentified
  REGION 1..45: note = CD8alpha hinge
TTTPAPRPPTPAPTIASQPLSLRPEACRPAAGGAVHTRGLDFACD

SEQ ID NO: 8 - DNA, 135 bp, unidentified
  misc_feature 1..135: note = encodes CD8alpha hinge
  source 1..135: mol_type = unassigned DNA
accacgacgccagcgccgcgaccaccaacaccggcgcccaccatcgcgtcgcagcccctgtccctgcgcccagaggcgtgccggccagcggcggggggcgcagtgcacacgagggggctggacttcgcctgtgat

SEQ ID NO: 9 - protein, 41 aa, unidentified
  REGION 1..41: note = CD28 hinge
CTIEVMYPPPYLDNEKSNGTIIHVKGKHLCPSPLFPGPSKP

SEQ ID NO: 10 - DNA, 123 bp, unidentified
  misc_feature 1..123: note = encodes CD28 hinge
  source 1..123: mol_type = unassigned DNA
tgtaccattgaagttatgtatcctcctccttacctagacaatgagaagagcaatggaaccattatccatgtgaaagggaaacacctttgtccaagtcccctatttcccggaccttctaagccc

SEQ ID NO: 11 - protein, 27 aa, unidentified
  REGION 1..27: note = CD28 transmembrane domain
FWVLVVVGGVLACYSLLVTVAFIIFWV

SEQ ID NO: 12 - DNA, 81 bp, unidentified
  misc_feature 1..81: note = encodes CD28 transmembrane domain
  source 1..81: mol_type = unassigned DNA
ttctgggtgctggtcgttgtgggcggcgtgctggcctgctacagcctgctggtgacagtggccttcatcatcttttgggtg

SEQ ID NO: 13 - protein, 25 aa, unidentified
  REGION 1..25: note = IL-2Rbeta transmembrane domain
IPWLGHLLVGLSGAFGFIILVYLLI

SEQ ID NO: 14 - DNA, 75 bp, unidentified
  misc_feature 1..75: note = encodes IL-2Rbeta transmembrane domain
  source 1..75: mol_type = unassigned DNA
attccgtggctcggccacctcctcgtgggcctcagcggggcttttggcttcatcatcttagtgtacttgctgatc

SEQ ID NO: 15 - protein, 112 aa, unidentified
  REGION 1..112: note = CD3zeta activation domain
RVKFSRSADAPAYKQGQNQLYNELNLGRREEYDVLDKRRGRDPEMGGKPRRKNPQEGLYNELQKDKMAEAYSEIGMKGERRRGKGHDGLYQGLSTATKDTYDALHMQALPPR

SEQ ID NO: 16 - DNA, 336 bp, unidentified
  misc_feature 1..336: note = encodes CD3zeta activation domain
  source 1..336: mol_type = unassigned DNA
agagtgaagttcagcaggagcgcagacgcccccgcgtacaagcagggccagaaccagctctataacgagctcaatctaggacgaagagaggagtacgatgttttggacaagcgtagaggccgggaccctgagatggggggaaagccgagaaggaagaaccctcaggaaggcctgtacaatgaactgcagaaagataagatggcggaggcctacagtgagattgggatgaaaggcgagcgccggaggggcaaggggcacgatggcctttaccagggactcagtacagccaccaaggacacctacgacgcccttcacatgcaggccctgccccctcgc

SEQ ID NO: 17 - protein, 43 aa, unidentified
  REGION 1..43: note = CD3zeta activation domain
RVKFSRSADAPAYQQGQNQLYNELNLGRREEYDVLHMQALPPR

SEQ ID NO: 18 - DNA, 129 bp, unidentified
  misc_feature 1..129: note = encodes CD3zeta activation domain
  source 1..129: mol_type = unassigned DNA
agagtgaagttcagcaggagcgcagacgcccccgcgtaccagcagggccagaaccagctctataacgagctcaatctaggacgaagagaggagtacgatgttttgcacatgcaggccctgccccctcgc

SEQ ID NO: 19 - protein, 41 aa, unidentified
  REGION 1..41: note = CD28 co-stimulatory domain
RSKRSRLLHSDYMNMTPRRPGPTRKHYQPYAPPRDFAAYRS

SEQ ID NO: 20 - DNA, 123 bp, unidentified
  misc_feature 1..123: note = encodes CD28 co-stimulatory domain
  source 1..123: mol_type = unassigned DNA
aggagcaagcggagcagactgctgcacagcgactacatgaacatgaccccccggaggcctggccccacccggaagcactaccagccctacgcccctcccagggatttcgccgcctaccggagc

SEQ ID NO: 21 - protein, 23 aa, unidentified
  REGION 1..23: note = TCR alpha transmembrane domain
VIGFRILLLKVAGFNLLMTLRLW

SEQ ID NO: 22 - DNA, 69 bp, unidentified
  misc_feature 1..69: note = encodes TCR alpha transmembrane domain
  source 1..69: mol_type = unassigned DNA
gtgattgggttccgaatcctcctcctgaaagtggccgggtttaatctgctcatgacgctgcggctgtgg

SEQ ID NO: 23 - protein, 23 aa, unidentified
  REGION 1..23: note = TCR beta transmembrane domain
TILYEILLGKATLYAVLVSALVL

SEQ ID NO: 24 - DNA, 69 bp, unidentified
  misc_feature 1..69: note = encodes TCR beta transmembrane domain
  source 1..69: mol_type = unassigned DNA
accatcctctatgagatcttgctagggaaggccaccttgtatgccgtgctggtcagtgccctcgtgctg

SEQ ID NO: 25 - protein, 10 aa, unidentified
  REGION 1..10: note = TCR beta intracellular domain
MAMVKRKDSR

SEQ ID NO: 26 - DNA, 30 bp, unidentified
  misc_feature 1..30: note = encodes TCR beta intracellular domain
  source 1..30: mol_type = unassigned DNA
atggccatggtcaagagaaaggattccaga

SEQ ID NO: 27 - protein, 532 aa, Homo sapiens
MAPSSPRPALPALLVLLGALFPGPGNAQTSVSPSKVILPRGGSVLVTCSTSCDQPKLLGIETPLPKKELLLPGNNRKVYELSNVQEDSQPMCYSNCPDGQSTAKTFLTVYWTPERVELAPLPSWQPVGKNLTLRCQVEGGAPRANLTVVLLRGEKELKREPAVGEPAEVTTTVLVRRDHHGANFSCRTELDLRPQGLELFENTSAPYQLQTFVLPATPPQLVSPRVLEVDTQGTVVCSLDGLFPVSEAQVHLALGDQRLNPTVTYGNDSFSAKASVSVTAEDEGTQRLTCAVILGNQSQETLQTVTIYSFPAPNVILTKPEVSEGTEVTVKCEAHPRAKVTLNGVPAQPLGPRAQLLLKATPEDNGRSFSCSATLEVAGQLIHKNQTRELRVLYGPRLDERDCPGNWTWPENSQQTPMCQAWGNPLPELKCLKDGTFPLPIGESVTVTRDLEGTYLCRARSTQGEVTRKVTVNVLSPRYEIVIITVVAAAVIMGTAGLSTYLYNRQRKIKKYRLQQAQKGTPMKPNTQATPP

SEQ ID NO: 28 - protein, 271 aa, Homo sapiens
MPEAPPLLLAAVLLGLVLLVVLLLLLRHWGWGLCLIGWNEFILQPIHNLLMGDTKEQRILNHVLQHAEPGNAQSVLEAIDTYCEQKEWAMNVGDKKGKIVDAVIQEHQPSVLLELGAYCGYSAVRMARLLSPGARLITIEINPDCAAITQRMVDFAGVKDKVTLVVGASQDIIPQLKKKYDVDTLDMVFLDHWKDRYLPDTLLLEECGLLRKGTVLLADNVICPGAPDFLAHVRGSSCFECTHYQSFLEYREVVDGLEKAIYKGPGSEAGP

SEQ ID NO: 29 - protein, 273 aa, Homo sapiens
MSGSQSEVAPSPQSPRSPEMGRDLRPGSRVLLLLLLLLLVYLTQPGNGNEGSVTGSCYCGKRISSDSPPSVQFMNRLRKHLRAYHRCLYYTRFQLLSWSVCGGNKDPWVQELMSCLDLKECGHAYSGIVAHQKHLLPTSPPISQASEGASSDIHTPAQMLLSTLQSTQRPTLPVGSLSSDKELTRPNETTIHTAGHSLAAGPEAGENQKQPEKNAGPTARTSATVPVLCLLAIIFILTAALSYVLCKRRRGQSPQSSPDLPVHYIPVAPDSNT

SEQ ID NO: 30 - protein, 247 aa, synthetic construct
  REGION 1..247: note = HLA scFv binding domain
DVLMTQTPLSLPVSLGDQASISCRSSQSIVHSNGNTYLEWYLQKPGQSPKLLIYKVSNRFSGVPDRFSGSGSGTDFTLKISRVEAEDLGVYYCFQGSHVPRTSGGGTKLEIKGGGGSGGGGSGGGGSGGQVQLQQSGPELVKPGASVRISCKASGYTFTSYHIHWVKQRPGQGLEWIGWIYPGNVNTEYNEKFKGKATLTADKSSSTAYMHLSSLTSEDSAVYFCAREEITYAMDYWGQGTSVTVSS

SEQ ID NO: 31 - protein, 247 aa, synthetic construct
  REGION 1..247: note = HLA scFv binding domain
QVQLVQSGAEVKKPGSSVKVSCKASGYTFTSYHIHWVRQAPGQGLEWMGWIYPGNVNTEYNEKFKGKATITADKSTSTAYMELSSLRSEDTAVYYCAREEITYAMDYWGQGTTVTVSSGGGGSGGGGSGGGGSGGEIVLTQSPGTLSLSPGERATLSCRSSQSIVHSNGNTYLEWYQQKPGQAPRLLIYKVSNRFSGIPDRFSGSGSGTDFTLTISRLEPEDFAVYYCFQGSHVPRTFGGGTKVEIK

SEQ ID NO: 32 - protein, 247 aa, synthetic construct
  REGION 1..247: note = HLA scFv binding domain
QVQLVQSGAEVKKPGSSVKVSCKASGYTFTSYHIHWVRQAPGQGLEWMGWIYPGNVNTEYNEKFKGKATITADKSTSTAYMELSSLRSEDTAVYYCAREEITYAMDYWGQGTTVTVSSGGGGSGGGGSGGGGSGGDIVMTQTPLSLPVTPGEPASISCRSSQSIVHSNGNTYLEWYLQKPGQSPQLLIYKVSNRFSGVPDRFSGSGSGTDFTLKISRVEAEDVGVYYCFQGSHVPRTFGGGTKVEIK

SEQ ID NO: 33 - protein, 247 aa, synthetic construct
  REGION 1..247: note = HLA scFv binding domain
EVQLVESGGGLVKPGGSLRLSCAASGYTFTSYHIHWVRQAPGKGLEWVGWIYPGNVNTEYNEKFKGRFTISRDDSKNTLYLQMNSLKTEDTAVYYCAREEITYAMDYWGQGTTVTVSSGGGGSGGGGSGGGGSGGDIQMTQSPSSLSASVGDRVTITCRSSQSIVHSNGNTYLEWYQQKPGKAPKLLIYKVSNRFSGVPSRFSGSGSGTDFTLTISSLQPEDFATYYCFQGSHVPRTFGGGTKVEIK

SEQ ID NO: 34 - protein, 247 aa, synthetic construct
  REGION 1..247: note = HLA scFv binding domain
QVQLVQSGAEVKKPGSSVKVSCKASGYTFTSYHIHWVRQAPGQGLEWIGWIYPGNVNTEYNEKFKGKATITADESTNTAYMELSSLRSEDTAVYYCAREEITYAMDYWGQGTLVTVSSGGGGSGGGGSGGGGSGGDIQMTQSPSTLSASVGDRVTITCRSSQSIVHSNGNTYLEWYQQKPGKAPKLLIYKVSNRFSGVPARFSGSGSGTEFTLTISSLQPDDFATYYCFQGSHVPRTFGQGTKVEVK

SEQ ID NO: 35 - protein, 247 aa, synthetic construct
  REGION 1..247: note = HLA scFv binding domain
QVQLVQSGAEVKKPGSSVKVSCKASGYTFTSYHMHWVRQAPGQGLEWIGYIYPGNVNTEYNEKFKGKATLTADKSTNTAYMELSSLRSEDTAVYFCAREEITYAMDYWGQGTLVTVSSGGGGSGGGGSGGGGSGGDVQMTQSPSTLSASVGDRVTITCSSSQSIVHSNGNTYMEWYQQKPGKAPKLLIYKVSNRFSGVPDRFSGSGSGTEFTLTISSLQPDDFATYYCHQGSHVPRTFGQGTKVEVK

SEQ ID NO: 36 - protein, 247 aa, synthetic construct
  REGION 1..247: note = HLA scFv binding domain
QVQLQQSGPELVKPGASVKMSCKASGYTFTSYHIQWVKQRPGQGLEWIGWIYPGDGSTQYNEKFKGKTTLTADKSSSTAYMLLSSLTSEDSAIYFCAREGTYYAMDYWGQGTSVTVSSGGGGSGGGGSGGGGSGGDVLMTQTPLSLPVSLGDQVSISCRSSQSIVHSNGNTYLEWYLQKPGQSPKLLIYKVSNRFSGVPDRFSGSGSGTDFTLKISRVEAEDLGVYYCFQGSHVPRTFGGGTKLEIK

SEQ ID NO: 37 - protein, 247 aa, synthetic construct
  REGION 1..247: note = HLA scFv binding domain
QLQLQESGPGLVKPSETLSLTCTVSGYTFTSYHIQWIRQPPGKGLEWIGWIYPGDGSTQYNEKFKGRATISVDTSKNQFSLNLDSVSAADTAIYYCAREGTYYAMDYWGKGSTVTVSSGGGGSGGGGSGGGGSGGDIQMTQSPSSLSASVGDRVTITCRSSQSIVHSNGNTYLEWYQQKPGKAPKLLIYKVSNRFSGVPSRFSGSGSGTDFTFTISSLQPEDIATYYCFQGSHVPRTFGPGTKVDIK

SEQ ID NO: 38 - protein, 247 aa, synthetic construct
  REGION 1..247: note = HLA scFv binding domain
EVQLVQSGAELKKPGSSVKVSCKASGYTFTSYHIQWVKQAPGQGLEWIGWIYPGDGSTQYNEKFKGKATLTVDKSTNTAYMELSSLRSEDTAVYYCAREGTYYAMDYWGQGTLVTVSSGGGGSGGGGSGGGGSGGDIQMTQSPSTLSASVGDRVTITCRSSQSIVHSNGNTYLEWYQQKPGKAPKLLIYKVSNRFSGVPSRFSGSGSGTDFTLTISSLQPDDFATYYCFQGSHVPRTFGQGTKVEVK

SEQ ID NO: 39 - protein, 247 aa, synthetic construct
  REGION 1..247: note = HLA scFv binding domain
QVQLVQSGAEVKKPGSSVKVSCKASGYTFTSYHIQWVRQAPGQGLEWMGWIYPGDGSTQYNEKFKGRVTITADKSTSTAYMELSSLRSEDTAVYYCAREGTYYAMDYWGQGTTVTVSSGGGGSGGGGSGGGGSGGEIVLTQSPGTLSLSPGERATLSCRSSQSIVHSNGNTYLEWYQQKPGQAPRLLIYKVSNRFSGIPDRFSGSGSGTDFTLTISRLEPEDFAVYYCFQGSHVPRTFGGGTKVEIK

SEQ ID NO: 40 - protein, 247 aa, synthetic construct
  REGION 1..247: note = HLA scFv binding domain
QVTLKQSGAEVKKPGSSVKVSCTASGYTFTSYHVSWVRQAPGQGLEWLGRIYPGDGSTQYNEKFKGKVTITADKSMDTSFMELTSLTSEDTAVYYCAREGTYYAMDLWGQGTLVTVSSGGGGSGGGGSGGGGSGGEIVLTQSPGTLSLSPGERATLSCRSSQSIVHSNGNTYLAWYQQKPGQAPRLLISKVSNRFSGVPDRFSGSGSGTDFTLTISRLEPEDFAVYYCQQGSHVPRTFGGGTKVEIK

SEQ ID NO: 41 - protein, 247 aa, synthetic construct
  REGION 1..247: note = HLA scFv binding domain
QVQLVQSGAEVKKPGASVKVSCKASGYTFTSYHMHWVRQAPGQRLEWMGWIYPGDGSTQYNEKFKGKVTITRDTSASTAYMELSSLRSEDTAVYYCAREGTYYAMDYWGQGTLVTVSSGGGGSGGGGSGGGGSGGDIVMTQTPLSLPVTPGEPASISCRSSQSIVHSNGNTYLDWYLQKPGQSPQLLIYKVSNRFSGVPDRFSGSGSGTDFTLKISRVEAEDVGVYYCMQGSHVPRTFGGGTKVEIK

SEQ ID NO: 42 - protein, 16 aa, synthetic construct
  REGION 1..16: note = HLA antigen binding domain CDR-L1
RSSQSIVHSNGNTYLE

SEQ ID NO: 43 - protein, 12 aa, synthetic construct
  REGION 1..12: note = HLA antigen binding domain CDR-L2
KVSNRFSGVPDR

SEQ ID NO: 44 - protein, 9 aa, synthetic construct
  REGION 1..9: note = HLA antigen binding domain CDR-L3
FQGSHVPRT

SEQ ID NO: 45 - protein, 12 aa, synthetic construct
  REGION 1..12: note = HLA antigen binding domain CDR-H1
ASGYTFTSYHIH

SEQ ID NO: 46 - protein, 18 aa, synthetic construct
  REGION 1..18: note = HLA antigen binding domain CDR-H2
WIYPGNVNTEYNEKFKGK

SEQ ID NO: 47 - protein, 9 aa, synthetic construct
  REGION 1..9: note = HLA antigen binding domain CDR-H3
EEITYAMDY

SEQ ID NO: 48 - protein, 16 aa, synthetic construct
  REGION 1..16: note = HLA antigen binding domain CDR-L1
RSSQSIVHSNGNTYLD

SEQ ID NO: 49 - protein, 12 aa, synthetic construct
  REGION 1..12: note = HLA antigen binding domain CDR-L2
KVSNRFSGVPDR

SEQ ID NO: 50 - protein, 9 aa, synthetic construct
  REGION 1..9: note = HLA antigen binding domain CDR-L3
MQGSHVPRT

SEQ ID NO: 51 - protein, 11 aa, synthetic construct
  REGION 1..11: note = HLA antigen binding domain CDR-H1
SGYTFTSYHMH

SEQ ID NO: 52 - protein, 17 aa, synthetic construct
  REGION 1..17: note = HLA antigen binding domain CDR-H2
WIYPGDGSTQYNEKFKG

SEQ ID NO: 53 - protein, 9 aa, synthetic construct
  REGION 1..9: note = HLA antigen binding domain CDR-H3
EGTYYAMDY

SEQ ID NO: 54 - protein, 670 aa, unidentified
  REGION 1..670: note = LILRB1
MTPILTVLICLGLSLGPRTHVQAGHLPKPTLWAEPGSVITQGSPVTLRCQGGQETQEYRLYREKKTALWITRIPQELVKKGQFPIPSITWEHAGRYRCYYGSDTAGRSESSDPLELVVTGAYIKPTLSAQPSPVVNSGGNVILQCDSQVAFDGFSLCKEGEDEHPQCLNSQPHARGSSRAIFSVGPVSPSRRWWYRCYAYDSNSPYEWSLPSDLLELLVLGVSKKPSLSVQPGPIVAPEETLTLQCGSDAGYNRFVLYKDGERDFLQLAGAQPQAGLSQANFTLGPVSRSYGGQYRCYGAHNLSSEWSAPSDPLDILIAGQFYDRVSLSVQPGPTVASGENVTLLCQSQGWMQTFLLTKEGAADDPWRLRSTYQSQKYQAEFPMGPVTSAHAGTYRCYGSQSSKPYLLTHPSDPLELVVSGPSGGPSSPTTGPTSTSGPEDQPLTPTGSDPQSGLGRHLGVVIGILVAVILLLLLLLLLFLILRHRRQGKHWTSTQRKADFQHPAGAVGPEPTDRGLQWRSSPAADAQEENLYAAVKHTQPEDGVEMDTRSPHDEDPQAVTYAEVKHSRPRREMASPPSPLSGEFLDTKDRQAEEDRQMDTEAAASEAPQDVTYAQLHSLTLRREATEPPPSQEGPSPAVPSIYATLAIHPSQEGPSPAVPSIYATLAIH

SEQ ID NO: 55 - DNA, 3229 bp, unidentified
  misc_feature 1..3229: note = LILRB1
  source 1..3229: mol_type = unassigned DNA
aaatgagttttaaaaaggcttgtccaggaagcacatatgggagctggtcactctgcattttgggccctcctggaggtgtttagaccttccgagagagaaactgagacacatgagagggaagaaatgactcagtggtgagaccctgtggagtcccacccacaaccagcacactgtgacccactgcacaaacctctagcccacagctcacttcctcctttaagaagagaagagaaaagaggagaggagaggaggaacagaaaagaaaagaaaagaaaaagtgggaaacaaataatctaagaatgaggagaaagcaagaagagtgacccccttgtgggcactccattggttttatggcgcctctactttctggagtttgtgtaaaacaaaaatattatggtctttgtgcacatttacatcaagctcagcctgggcggcacagccagatgcgagatgcgtctctgctgatctgagtctgcctgcagcatggacctgggtcttccctgaagcatctccagggctggagggacgactgccatgcaccgagggctcatccatccacagagcagggcagtgggaggagacgccatgacccccatcctcacggtcctgatctgtctcgggctgagtctgggcccccggacccacgtgcaggcagggcacctccccaagcccaccctctgggctgaaccaggctctgtgatcacccaggggagtcctgtgaccctcaggtgtcaggggggccaggagacccaggagtaccgtctatatagagaaaagaaaacagcaccctggattacacggatcccacaggagcttgtgaagaagggccagttccccatcccatccatcacctgggaacacacagggcggtatcgctgttactatggtagcgacactgcaggccgctcagagagcagtgaccccctggagctggtggtgacaggagcctacatcaaacccaccctctcagcccagcccagccccgtggtgaactcaggagggaatgtaaccctccagtgtgactcacaggtggcatttgatggcttcattctgtgtaaggaaggagaagatgaacacccacaatgcctgaactcccagccccatgcccgtgggtcgtcccgcgccatcttctccgtgggccccgtgagcccgagtcgcaggtggtggtacaggtgctatgcttatgactcgaactctccctatgagtggtctctacccagtgatctcctggagctcctggtcctaggtgtttctaagaagccatcactctcagtgcagccaggtcctatcgtggcccctgaggagaccctgactctgcagtgtggctctgatgctggctacaacagatttgttctgtataaggacggggaacgtgacttccttcagctcgctggcgcacagccccaggctgggctctcccaggccaacttcaccctgggccctgtgagccgctcctacgggggccagtacagatgctacggtgcacacaacctctcctccgagtggtcggcccccagcgaccccctggacatcctgatcgcaggacagttctatgacagagtctccctctcggtgcagccgggccccacggtggcctcaggagagaacgtgaccctgctgtgtcagtcacagggatggatgcaaactttccttctgaccaaggagggggcagctgatgacccatggcgtctaagatcaacgtaccaatctcaaaaataccaggctgaattccccatgggtcctgtgacctcagcccatgcggggacctacaggtgctacggctcacagagctccaaaccctacctgctgactcaccccagtgaccccctggagctcgtggtctcaggaccgtctgggggccccagctccccgacaacaggccccacctccacatctggccctgaggaccagcccctcacccccaccgggtcggatccccagagtggtctgggaaggcacctgggggttgtgatcggcatcttggtggccgtcatcctactgctcctcctcctcctcctcctcttcctcatcctccgacatcgacgtcagggcaaacactggacatcgacccagagaaaggctgatttccaacatcctgcaggggctgtggggccagagcccacagacagaggcctgcagtggaggtccagcccagctgccgatgcccaggaagaaaacctctatgctgccgtgaagcacacacagcctgaggatggggtggagatggacactcggagcccacacgatgaagacccccaggcagtgacgtatgccgaggtgaaacactccagacctaggagagaaatggcctctcctccttccccactgtctggggaattcctggacacaaaggacagacaggcggaagaggacaggcagatggacactgaggctgctgcatctgaagccccccaggatgtgacctacgcccagctgcacagcttgaccctcagacgggaggcaactgagcctcctccatcccaggaagggccctctccagctgtgcccagcatctacgccactctggccatccactagcccagggggggacgcagaccccacactccatggagtctggaatgcatgggagctgcccccccagtggacaccattggaccccacccagcctggatctaccccaggagactctgggaacttttaggggtcactcaattctgcagtataaataactaatgtctctacaattttgaaataaagcaacagacttctcaataatcaatgaagtagctgagaaaactaagtcagaaagtgcattaaactgaatcacaatgtaaatattacacatcaagcgatgaaactggaaaactacaagccacgaatgaatgaattaggaaagaaaaaaagtaggaaatgaatgatcttggctttcctataagaaatttagggcagggcacggtggctcacgcctgtaattccagcactttgggaggccgaggcgggcagatcacgagttcaggagatcgagaccatcttggccaacatggtgaaaccctgtctctcctaaaaatacaaaaattagctggatgtggtggcagtgcctgtaatcccagctatttgggaggctgaggcaggagaatcgcttgaaccagggagtcagaggtttcagtgagccaagatcgcaccactgctctccagcctggcgacagagggagactccatctcaaattaaaaaaaaaaaaaaaaaagaaagaaaaaaaaaaaaaaaaaa

SEQ ID NO: 56 - protein, 6 aa, unidentified
  REGION 1..6: note = immunoreceptor tyrosine-based inhibitory motif
NLYAAV

SEQ ID NO: 57 - protein, 6 aa, unidentified
  REGION 1..6: note = immunoreceptor tyrosine-based inhibitory motif
VTYAEV

SEQ ID NO: 58 - protein, 6 aa, unidentified
  REGION 1..6: note = immunoreceptor tyrosine-based inhibitory motif
VTYAQL

SEQ ID NO: 59 - protein, 6 aa, unidentified
  REGION 1..6: note = immunoreceptor tyrosine-based inhibitory motif
SIYATL

SEQ ID NO: 60 - protein, 35 aa, unidentified
  REGION 1..35: note = ITIM1-2
NLYAAVKHTQPEDGVEMDTRSPHDEDPQAVTYAEV

SEQ ID NO: 61 - protein, 58 aa, unidentified
  REGION 1..58: note = ITIM2-3
VTYAEVKHSRPRREMASPPSPLSGEFLDTKDRQAEEDRQMDTEAAASEAPQDVTYAQL

SEQ ID NO: 62 - protein, 36 aa, unidentified
  REGION 1..36: note = ITIM3-4
VTYAQLHSLTLRREATEPPPSQEGPSPAVPSIYATL

SEQ ID NO: 63 - protein, 87 aa, unidentified
  REGION 1..87: note = ITIM1-3
NLYAAVKHTQPEDGVEMDTRSPHDEDPQAVTYAEVKHSRPRREMASPPSPLSGEFLDTKDRQAEEDRQMDTEAAASEAPQDVTYAQL

SEQ ID NO: 64 - protein, 88 aa, unidentified
  REGION 1..88: note = ITIM2-4
VTYAEVKHSRPRREMASPPSPLSGEFLDTKDRQAEEDRQMDTEAAASEAPQDVTYAQLHSLTLRREATEPPPSQEGPSPAVPSIYATL

SEQ ID NO: 65 - protein, 117 aa, unidentified
  REGION 1..117: note = ITIM1-4
NLYAAVKHTQPEDGVEMDTRSPHDEDPQAVTYAEVKHSRPRREMASPPSPLSGEFLDTKDRQAEEDRQMDTEAAASEAPQDVTYAQLHSLTLRREATEPPPSQEGPSPAVPSIYATL

SEQ ID NO: 66 - protein, 20 aa, unidentified
  REGION 1..20: note = D3D4 domain
YGSQSSKPYLLTHPSDPLEL

SEQ ID NO: 67 - protein, 43 aa, unidentified
  REGION 1..43: note = Short hinge
VVSGPSGGPSSPTTGPTSTSGPEDQPLTPTGSDPQSGLGRHLG

SEQ ID NO: 68 - protein, 86 aa, unidentified
  REGION 1..86: note = Hinge-transmembrane
YGSQSSKPYLLTHPSDPLELVVSGPSGGPSSPTTGPTSTSGPEDQPLTPTGSDPQSGLGRHLGVVIGILVAVILLLLLLLLLFLIL

SEQ ID NO: 69 - protein, 190 aa, unidentified
  REGION 1..190: note = Transmembrane-intracellular domain.
VVIGILVAVILLLLLLLLLFLILRHRRQGKHWTSTQRKADFQHPAGAVGPEPTDRGLQWRSSPAADAQEENLYAAVKHTQPEDGVEMDTRSPHDEDPQAVTYAEVKHSRPRREMASPPSPLSGEFLDTKDRQAEEDRQMDTEAAASEAPQDVTYAQLHSLTLRREATEPPPSQEGPSPAVPSIYATLAIH

SEQ ID NO: 70 - protein, 167 aa, unidentified
  REGION 1..167: note = LILRB1 intracellular domain
RHRRQGKHWTSTQRKADFQHPAGAVGPEPTDRGLQWRSSPAADAQEENLYAAVKHTQPEDGVEMDTRSPHDEDPQAVTYAEVKHSRPRREMASPPSPLSGEFLDTKDRQAEEDRQMDTEAAASEAPQDVTYAQLHSLTLRREATEPPPSQEGPSPAVPSIYATLAIH

SEQ ID NO: 71 - protein, 253 aa, unidentified
  REGION 1..253: note = LILRB1 hinge-transmembrane-intracellular domain
YGSQSSKPYLLTHPSDPLELVVSGPSGGPSSPTTGPTSTSGPEDQPLTPTGSDPQSGLGRHLGVVIGILVAVILLLLLLLLLFLILRHRRQGKHWTSTQRKADFQHPAGAVGPEPTDRGLQWRSSPAADAQEENLYAAVKHTQPEDGVEMDTRSPHDEDPQAVTYAEVKHSRPRREMASPPSPLSGEFLDTKDRQAEEDRQMDTEAAASEAPQDVTYAQLHSLTLRREATEPPPSQEGPSPAVPSIYATLAIH

SEQ ID NO: 72 - protein, 233 aa, unidentified
  REGION 1..233: note = LILRB1 hinge-transmembrane-intracellular domain
VVSGPSGGPSSPTTGPTSTSGPEDQPLTPTGSDPQSGLGRHLGVVIGILVAVILLLLLLLLLFLILRHRRQGKHWTSTQRKADFQHPAGAVGPEPTDRGLQWRSSPAADAQEENLYAAVKHTQPEDGVEMDTRSPHDEDPQAVTYAEVKHSRPRREMASPPSPLSGEFLDTKDRQAEEDRQMDTEAAASEAPQDVTYAQLHSLTLRREATEPPPSQEGPSPAVPSIYATLAIH

SEQ ID NO: 73 - protein, 63 aa, unidentified
  REGION 1..63: note = LILRB1 hinge domain
YGSQSSKPYLLTHPSDPLELVVSGPSGGPSSPTTGPTSTSGPEDQPLTPTGSDPQSGLGRHLG

SEQ ID NO: 74 - protein, 23 aa, unidentified
  REGION 1..23: note = LILRB1 transmembrane domain
VVIGILVAVILLLLLLLLLFLIL

SEQ ID NO: 75 - protein, 740 aa, Homo sapiens
MRQTLPLLLLTVLRPSWADPPQEKVPLFRVTQQGPWGSSGSNATDSPCEGLPAADATALTLANRNLERLPGCLPRTLRSLDASHNLLRALSTSELGHLEQLQVLTLRHNRIAALRWGPGGPAGLHTLDLSYNQLAALPPCTGPALSSLRALALAGNPLRALQPRAFACFPALQLLNLSCTALGRGAQGGIAEAAFAGEDGAPLVTLEVLDLSGTFLERVESGWIRDLPKLTSLYLRKMPRLTTLEGDIFKMTPNLQQLDCQDSPALASVATHIFQDTPHLQVLLFQNCNLSSFPPWTLDSSQVLSINLFGNPLTCSCDLSWLLTDAKRTVLSRAADTMCAPAAGSSGPFSASLSLSQLPGVCQSDQSTTLGASHPPCFNRSTYAQGTTVAPSAAPATRPAGDQQSVSKAPNVGSRTIAAWPHSDAREGTAPSTTNSVAGHSNSSVFPRAASTTRTQHRGEHAPELVLEPDISAASTPLASKLLGPFPTSWDRSISSPQPGQRTHATPQAPNPSLSEGEIPVLLLDDYSEEEEGRKEEVGTPHQDVPCDYHPCKHLQTPCAELQRRWRCRCPGLSGEDTIPDPPRLQGVTETTDTSALVHWCAPNSVVHGYQIRYSAEGWAGNQSVVGVIYATARQHPLYGLSPGTTYRVCVLAANRAGLSQPRSSGWRSPCAAFTTKPSFALLLSGLCAASGLLLASTVVLSACLCRRGQTLGLQRCDTHLVAYKNPAFDDYPLGLQTVS

SEQ ID NO: 76 - protein, 320 aa, Homo sapiens
MGLPWGQPHLGLQMLLLALNCLRPSLSLGEWGSWMDASSQTQGAGGPAGVIGPWAPAPLRLGEAAPGTPTPVSVAHLLSPVATELVPYTPQITAWDLEGKVTATTFSLEQPRCVFDGLASASDTVWLVVAFSNASRGFQNPETLADIPASPQLLTDGHYMTLPLSPDQLPCGDPMAGSGGAPVLRVGHDHGCHQQPFCNAPLPGPGPYREDPRIHRHLARAAKWQHDRHYLHPLFSGRPPTLGLLGSLYHALLQPVVAGGGPGAAADRLLHGQALHDPPHPTQRGRHTAGGLQAWPGPPPQPQPLAWPLCMGLGEMGRRE

SEQ ID NO: 77 - protein, 276 aa, Homo sapiens
MGLPWGQPHLGLQMLLLALNCLRPSLSLELVPYTPQITAWDLEGKVTATTFSLEQPRCVFDGLASASDTVWLVVAFSNASRGFQNPETLADIPASPQLLTDGHYMTLPLSPDQLPCGDPMAGSGGAPVLRVGHDHGCHQQPFCNAPLPGPGPYRVKFLLMDTRGSPRAETKWSDPITLHQGKTPGSIDTWPGRRSGSMIVITSILSSLAGLLLLAFLAASTMRFSSLWWPEEAPEQLRIGSFMGKRYMTHHIPPSEAATLPVGCKPGLDPLPSLSP

SEQ ID NO: 78 - protein, 265 aa, Homo sapiens
MGLPWGQPHLGLQMLLLALNCLRPSLSLELVPYTPQITAWDLEGKVTATTFSLEQPRCVFDGLASASDTVWLVVAFSNASRGFQNPETLADIPASPQLLTDGHYMTLPLSPDQLPCGDPMAGSGGAPVLRVGHDHGCHQQPFCNAPLPGPGPYREDPRIHRHLARAAKWQHDRHYLHPLFSGRPPTLGLLGSLYHALLQPVVAGGGPGAAADRLLHGQALHDPPHPTQRGRHTAGGLQAWPGPPPQPQPLAWPLCMGLGEMGRRE

SEQ ID NO: 79 - protein, 276 aa, Homo sapiens
MGLPWGQPHLGLQMLLLALNCLRPSLSLELVPYTPQITAWDLEGKVTATTFSLEQPRCVFDGLASASDTVWLVVAFSNASRGFQNPETLADIPASPQLLTDGHYMTLPLSPDQLPCGDPMAGSGGAPVLRVGHDHGCHQQPFCNAPLPGPGPYRVKFLLMDTRGSPRAETKWSDPITLHQGKTPGSIDTWPGRRSGSMIVITSILSSLAGLLLLAFLAASTMRFSSLWWPEEAPEQLRIGSFMGKRYMTHHIPPREAATLPVGCKPGLDPLPSLSP

SEQ ID NO: 80 - protein, 239 aa, synthetic construct
  REGION 1..239: note = MSLN scFv domain
QVQLQQSGPELEKPGASVKISCKASGYSFTGYTMNWVKQSHGKSLEWIGLITPYNGASSYNQKFRGKATLTVDKSSSTAYMDLLSLTSEDSAVYFCARGGYDGRGFDYWGQGTTVTVSSGGGGSGGGGSGGGGSDIELTQSPAIMSASPGEKVTMTCSASSSVSYMHWYQQKSGTSPKRWIYDTSKLASGVPGRFSGSGSGNSYSLTISSVEAEDDATYYCQQWSGYPLTFGAGTKLEI

SEQ ID NO: 81 - protein, 64 aa, unidentified
  REGION 1..64: note = Hinge (iTIM hinge)
YGSQSSKPYLLTHPSDPLELVVSGPSGGPSSPTTGPTSTSGPEDQPLTPTGSDPQSGLGRHLGV

SEQ ID NO: 82 - protein, 44 aa, unidentified
  REGION 1..44: note = Short hinge 2
VVSGPSGGPSSPTTGPTSTSGPEDQPLTPTGSDPQSGLGRHLGV

SEQ ID NO: 83 - protein, 67 aa, unidentified
  REGION 1..67: note = Long hinge 1
AGSGGSGGSGGSPVPSTPPTPSPSTPPTPSPSGGSGNSSGSGGSPVPSTPPTPSPSTPPTPSPSASV

SEQ ID NO: 84 - protein, 75 aa, unidentified
  REGION 1..75: note = Long hinge 2
AGSGGSGGSGGSPVPSTPPTNSSSTPPTPSPSPVPSTPPTNSSSTPPTPSPSPVPSTPPTNSSSTPPTPSPSASV

SEQ ID NO: 85 - protein, 407 aa, synthetic construct
  REGION 1..407: note = PA2.1.14 (VL:VH) scFv LIR1 sHTICD
TEFTLTISSLQPDDFATYYCFQGSHVPRTFGQGTKVEVKGGGGSGGGGSGGGGSGGQVQLVQSGAEVKKPGSSVKVSCKASGYTFTSYHIHWVRQAPGQGLEWIGWIYPGNVNTEYNEKFKGKATITADESTNTAYMELSSLRSEDTAVYYCAREEITYAMDYWGQGTLVTVSSVVSGPSGGPSSPTTGPTSTSGPEDQPLTPTGSDPQSGLGRHLGVVIGILVAVILLLLLLLLLFLILRHRRQGKHWTSTQRKADFQHPAGAVGPEPTDRGLQWRSSPAADAQEENLYAAVKHTQPEDGVEMDTRSPHDEDPQAVTYAEVKHSRPRREMASPPSPLSGEFLDTKDRQAEEDRQMDTEAAASEAPQDVTYAQLHSLTLRREATEPPPSQEGPSPAVPSIYATLAIH

SEQ ID NO: 86 - protein, 500 aa, synthetic construct
  REGION 1..500: note = PA2.1.14 (VL:VH) scFv LIR1 HTICD
DIQMTQSPSTLSASVGDRVTITCRSSQSIVHSNGNTYLEWYQQKPGKAPKLLIYKVSNRFSGVPARFSGSGSGTEFTLTISSLQPDDFATYYCFQGSHVPRTFGQGTKVEVKGGGGSGGGGSGGGGSGGQVQLVQSGAEVKKPGSSVKVSCKASGYTFTSYHIHWVRQAPGQGLEWIGWIYPGNVNTEYNEKFKGKATITADESTNTAYMELSSLRSEDTAVYYCAREEITYAMDYWGQGTLVTVSSYGSQSSKPYLLTHPSDPLELVVSGPSGGPSSPTTGPTSTSGPEDQPLTPTGSDPQSGLGRHLGVVIGILVAVILLLLLLLLLFLILRHRRQGKHWTSTQRKADFQHPAGAVGPEPTDRGLQWRSSPAADAQEENLYAAVKHTQPEDGVEMDTRSPHDEDPQAVTYAEVKHSRPRREMASPPSPLSGEFLDTKDRQAEEDRQMDTEAAASEAPQDVTYAQLHSLTLRREATEPPPSQEGPSPAVPSIYATLAIH

SEQ ID NO: 87 - protein, 462 aa, synthetic construct
  REGION 1..462: note = MSLN_SsI CD8_HT 41BB CD3z
QVQLQQSGPELEKPGASVKISCKASGYSFTGYTMNWVKQSHGKSLEWIGLITPYNGASSYNQKFRGKATLTVDKSSSTAYMDLLSLTSEDSAVYFCARGGYDGRGFDYWGQGTTVTVSSGGGGSGGGGSGGGGSDIELTQSPAIMSASPGEKVTMTCSASSSVSYMHWYQQKSGTSPKRWIYDTSKLASGVPGRFSGSGSGNSYSLTISSVEAEDDATYYCQQWSGYPLTFGAGTKLEITTTPAPRPPTPAPTIASQPLSLRPEACRPAAGGAVHTRGLDFACDIYIWAPLAGTCGVLLLSLVITLYCKRGRKKLLYIFKQPFMRPVQTTQEEDGCSCRFPEEEEGGCELRVKFSRSADAPAYKQGQNQLYNELNLGRREEYDVLDKRRGRDPEMGGKPRRKNPQEGLYNELQKDKMAEAYSEIGMKGERRRGKGHDGLYQGLSTATKDTYDALHMQALPPR

SEQ ID NO: 88 - protein, 480 aa, synthetic construct
  REGION 1..480: note = PA2.1.14 scFv LIR1 sHTICD
QVQLVQSGAEVKKPGSSVKVSCKASGYTFTSYHIHWVRQAPGQGLEWIGWIYPGNVNTEYNEKFKGKATITADESTNTAYMELSSLRSEDTAVYYCAREEITYAMDYWGQGTLVTVSSGGGGSGGGGSGGGGSGGDIQMTQSPSTLSASVGDRVTITCRSSQSIVHSNGNTYLEWYQQKPGKAPKLLIYKVSNRFSGVPARFSGSGSGTEFTLTISSLQPDDFATYYCFQGSHVPRTFGQGTKVEVKVVSGPSGGPSSPTTGPTSTSGPEDQPLTPTGSDPQSGLGRHLGVVIGILVAVILLLLLLLLLFLILRHRRQGKHWTSTQRKADFQHPAGAVGPEPTDRGLQWRSSPAADAQEENLYAAVKHTQPEDGVEMDTRSPHDEDPQAVTYAEVKHSRPRREMASPPSPLSGEFLDTKDRQAEEDRQMDTEAAASEAPQDVTYAQLHSLTLRREATEPPPSQEGPSPAVPSIYATLAIH

SEQ ID NO: 89 - protein, 500 aa, synthetic construct
  REGION 1..500: note = PA2.1.14 scFv LIR1 HTICD
QVQLVQSGAEVKKPGSSVKVSCKASGYTFTSYHIHWVRQAPGQGLEWIGWIYPGNVNTEYNEKFKGKATITADESTNTAYMELSSLRSEDTAVYYCAREEITYAMDYWGQGTLVTVSSGGGGSGGGGSGGGGSGGDIQMTQSPSTLSASVGDRVTITCRSSQSIVHSNGNTYLEWYQQKPGKAPKLLIYKVSNRFSGVPARFSGSGSGTEFTLTISSLQPDDFATYYCFQGSHVPRTFGQGTKVEVKYGSQSSKPYLLTHPSDPLELVVSGPSGGPSSPTTGPTSTSGPEDQPLTPTGSDPQSGLGRHLGVVIGILVAVILLLLLLLLLFLILRHRRQGKHWTSTQRKADFQHPAGAVGPEPTDRGLQWRSSPAADAQEENLYAAVKHTQPEDGVEMDTRSPHDEDPQAVTYAEVKHSRPRREMASPPSPLSGEFLDTKDRQAEEDRQMDTEAAASEAPQDVTYAQLHSLTLRREATEPPPSQEGPSPAVPSIYATLAIH

SEQ ID NO: 90 - protein, 32 aa, unidentified
  REGION 1..32: note = Hinge (truncated)
TTGPTSTSGPEDQPLTPTGSDPQSGLGRHLGV

SEQ ID NO: 91 - protein, 85 aa, unidentified
  REGION 1..85: note = 2X short hinge
VVSGPSGGPSSPTTGPTSTSGPEDQPLTPTGSDPQSGLGRHVVSGPSGGPSSPTTGPTSTSGPEDQPLTPTGSDPQSGLGRHLGV

SEQ ID NO: 92 - protein, 7 aa, synthetic construct
  REGION 1..7: note = anti-HLA-A*11 CDR-H1
SGGYYWS

SEQ ID NO: 93 - protein, 7 aa, synthetic construct
  REGION 1..7: note = anti-HLA-A*11 CDR-H1
TSGVGVG

SEQ ID NO: 94 - protein, 5 aa, synthetic construct
  REGION 1..5: note = anti-HLA-A*11 CDR-H1
SYAMH

SEQ ID NO: 95 - protein, 5 aa, synthetic construct
  REGION 1..5: note = anti-HLA-A*11 CDR-H1
SYDMH

SEQ ID NO: 96 - protein, 5 aa, synthetic construct
  REGION 1..5: note = anti-HLA-A*11 CDR-H1
SYWMH

SEQ ID NO: 97 - protein, 16 aa, synthetic construct
  REGION 1..16: note = anti-HLA-A*11 CDR-H2
YIYYSGSTYYNPSLKS

SEQ ID NO: 98 - protein, 16 aa, synthetic construct
  REGION 1..16: note = anti-HLA-A*11 CDR-H2
LIYWNDDKRYSPSLKS

SEQ ID NO: 99 - protein, 17 aa, synthetic construct
  REGION 1..17: note = anti-HLA-A*11 CDR-H2
WINAGNGNTKYSQKFQG

SEQ ID NO: 100 - protein, 16 aa, synthetic construct
  REGION 1..16: note = anti-HLA-A*11 CDR-H2
AIGTAGDTYYPGSVKG

SEQ ID NO: 101 - protein, 17 aa, synthetic construct
  REGION 1..17: note = anti-HLA-A*11 CDR-H2
RINSDGSSTSYADSVKG

SEQ ID NO: 102 - protein, 9 aa, synthetic construct
  REGION 1..9: note = anti-HLA-A*11 CDR-H3
HYYYYSMDV

SEQ ID NO: 103 - protein, 9 aa, synthetic construct
  REGION 1..9: note = anti-HLA-A*11 CDR-H3
HYYYYYLDV

SEQ ID NO: 104 - protein, 8 aa, synthetic construct
  REGION 1..8: note = anti-HLA-A*11 CDR-H3
HYYYYMDV

SEQ ID NO: 105 - protein, 9 aa, synthetic construct
  REGION 1..9: note = anti-HLA-A*11 CDR-H3
HYYYYYMDV

SEQ ID NO: 106 - protein, 9 aa, synthetic construct
  REGION 1..9: note = anti-HLA-A*11 CDR-H3
KTTSFYFDY

SEQ ID NO: 107 - protein, 10 aa, synthetic construct
  REGION 1..10: note = anti-HLA-A*11 CDR-H3
RHMRLSCFDY

SEQ ID NO: 108 - protein, 12 aa, synthetic construct
  REGION 1..12: note = anti-HLA-A*11 CDR-H3
EGNGANPDAFDI

SEQ ID NO: 109 - protein, 11 aa, synthetic construct
  REGION 1..11: note = anti-HLA-A*11 CDR-H3
DLPGSYWYFDL

SEQ ID NO: 110 - protein, 10 aa, synthetic construct
  REGION 1..10: note = anti-HLA-A*11 CDR-H3
GVLLYNWFDP

SEQ ID NO: 111 - protein, 11 aa, synthetic construct
  REGION 1..11: note = anti-HLA-A*11 CDR1 LC
RASQSISSYLN

SEQ ID NO: 112 - protein, 7 aa, synthetic construct
  REGION 1..7: note = anti-HLA-A*11 CDR2 LC
AASSLQS

SEQ ID NO: 113 - protein, 9 aa, synthetic construct
  REGION 1..9: note = anti-HLA-A*11 CDR3 LC
QQSYSTPLT

SEQ ID NO: 114 - protein, 243 aa, synthetic construct
  REGION 1..243: note = HLA-A*11 antigen binding domain
QVQLQESGPGLVKPSQTLSLTCTVSGGSISSGGYYWSWIRQPPGKGLEWIGYIYYSGSTYYNPSLKSRVTISVDTSKNQFSLKLSSVTAADTAVYYCARHYYYYSMDVWGKGTTVTVSSGGGGSGGGGSGGGGSGGDIQMTQSPSSLSASVGDRVTITCRASQSISSYLNWYQQKPGKAPKLLIYAASSLQSGVPSRFSGSGSGTDFTLTISSLQPEDFATYYCQQSYSTPLTFGGGTKVEIK

SEQ ID NO: 115 - protein, 244 aa, synthetic construct
  REGION 1..244: note = HLA-A*11 antigen binding domain
QITLKESGPTLVKPTQTLTLTCTFSGFSLSTSGVGVGWIRQPPGKALEWLALIYWNDDKRYSPSLKSRLTITKDTSKNQVVLTMTNMDPVDTATYYCAHRHMRLSCFDYWGQGTLVTVSSGGGGSGGGGSGGGGSGGDIQMTQSPSSLSASVGDRVTITCRASQSISSYLNWYQQKPGKAPKLLIYAASSLQSGVPSRFSGSGSGTDFTLTISSLQPEDFATYYCQQSYSTPLTFGGGTKVEIK

SEQ ID NO: 116 - protein, 245 aa, synthetic construct
  REGION 1..245: note = HLA-A*11 antigen binding domain
QVQLVQSGAEVKKPGASVKVSCKASGYTFTSYAMHWVRQAPGQRLEWMGWINAGNGNTKYSQKFQGRVTITRDTSASTAYMELSSLRSEDTAVYYCAREGNGANPDAFDIWGQGTMVTVSSGGGGSGGGGSGGGGSGGDIQMTQSPSSLSASVGDRVTITCRASQSISSYLNWYQQKPGKAPKLLIYAASSLQSGVPSRFSGSGSGTDFTLTISSLQPEDFATYYCQQSYSTPLTFGGGTKVEIK

SEQ ID NO: 117 - protein, 243 aa, synthetic construct
  REGION 1..243: note = HLA-A*11 antigen binding domain
EVQLVESGGGLVQPGGSLRLSCAASGFTFSSYDMHWVRQATGKGLEWVSAIGTAGDTYYPGSVKGRFTISRENAKNSLYLQMNSLRAGDTAVYYCARDLPGSYWYFDLWGRGTLVTVSSGGGGSGGGGSGGGGSGGDIQMTQSPSSLSASVGDRVTITCRASQSISSYLNWYQQKPGKAPKLLIYAASSLQSGVPSRFSGSGSGTDFTLTISSLQPEDFATYYCQQSYSTPLTFGGGTKVEIK

SEQ ID NO: 118 - protein, 243 aa, synthetic construct
  REGION 1..243: note = HLA-A*11 antigen binding domain
QVQLQESGPGLVKPSQTLSLTCTVSGGSISSGGYYWSWIRQPPGKGLEWIGYIYYSGSTYYNPSLKSRVTISVDTSKNQFSLKLSSVTAADTAVYYCARHYYYYYLDVWGKGTTVTVSSGGGGSGGGGSGGGGSGGDIQMTQSPSSLSASVGDRVTITCRASQSISSYLNWYQQKPGKAPKLLIYAASSLQSGVPSRFSGSGSGTDFTLTISSLQPEDFATYYCQQSYSTPLTFGGGTKVEIK

SEQ ID NO: 119 - protein, 243 aa, synthetic construct
  REGION 1..243: note = HLA-A*11 antigen binding domain
EVQLVESGGGLVQPGGSLRLSCAASGFTFSSYWMHWVRQAPGKGLVWVSRINSDGSSTSYADSVKGRFTISRDNAKNTLYLQMNSLRAEDTAVYYCCLGVLLYNWFDPWGQGTLVTVSSGGGGSGGGGSGGGGSGGDIQMTQSPSSLSASVGDRVTITCRASQSISSYLNWYQQKPGKAPKLLIYAASSLQSGVPSRFSGSGSGTDFTLTISSLQPEDFATYYCQQSYSTPLTFGGGTKVEIK

SEQ ID NO: 120 - protein, 242 aa, synthetic construct
  REGION 1..242: note = HLA-A*11 antigen binding domain
QVQLQESGPGLVKPSQTLSLTCTVSGGSISSGGYYWSWIRQPPGKGLEWIGYIYYSGSTYYNPSLKSRVTISVDTSKNQFSLKLSSVTAADTAVYYCARHYYYYMDVWGKGTTVTVSSGGGGSGGGGSGGGGSGGDIQMTQSPSSLSASVGDRVTITCRASQSISSYLNWYQQKPGKAPKLLIYAASSLQSGVPSRFSGSGSGTDFTLTISSLQPEDFATYYCQQSYSTPLTFGGGTKVEIK

SEQ ID NO: 121 - protein, 243 aa, synthetic construct
  REGION 1..243: note = HLA-A*11 antigen binding domain
QITLKESGPTLVKPTQTLTLTCTFSGFSLSTSGVGVGWIRQPPGKALEWLALIYWNDDKRYSPSLKSRLTITKDTSKNQVVLTMTNMDPVDTATYYCAHKTTSFYFDYWGQGTLVTVSSGGGGSGGGGSGGGGSGGDIQMTQSPSSLSASVGDRVTITCRASQSISSYLNWYQQKPGKAPKLLIYAASSLQSGVPSRFSGSGSGTDFTLTISSLQPEDFATYYCQQSYSTPLTFGGGTKVEIK

SEQ ID NO: 122 - protein, 243 aa, synthetic construct
  REGION 1..243: note = HLA-A*11 antigen binding domain
QVQLQESGPGLVKPSQTLSLTCTVSGGSISSGGYYWSWIRQPPGKGLEWIGYIYYSGSTYYNPSLKSRVTISVDTSKNQFSLKLSSVTAADTAVYYCARHYYYYYMDVWGKGTTVTVSSGGGGSGGGGSGGGGSGGDIQMTQSPSSLSASVGDRVTITCRASQSISSYLNWYQQKPGKAPKLLIYAASSLQSGVPSRFSGSGSGTDFTLTISSLQPEDFATYYCQQSYSTPLTFGGGTKVEIK

SEQ ID NO: 123 - DNA, 729 bp, synthetic construct
  misc_feature 1..729: note = HLA-A*11 antigen binding domain
  source 1..729: mol_type = other DNA
caggtgcagctgcaggaaagcggccctggcctggtgaaacccagccagaccctgagcctgacctgcacagtgtccggcggctcgatcagcagcggcggctactactggtcctggatcagacagccccctggcaagggcctggaatggatcggctacatctactacagcggcagcacctactacaaccccagcctgaagtccagagtgaccatcagcgtggacaccagcaagaaccagttcagcctgaagctgagcagcgtgacagccgccgacaccgctgtgtattactgtgcgagacactactactactactccatggacgtctggggcaaagggaccacggtcaccgtgtcctcaggcggaggtggaagcggagggggaggatctggcggcggaggaagcggaggcgacatccagatgacccagtctccatcctccctgtctgcatctgtaggagacagagtcaccatcacttgccgggcaagtcagagcattagcagctatttaaattggtatcagcagaaaccagggaaagcccctaagctcctgatctatgctgcatccagtttgcaaagtggggtcccatcaaggttcagtggcagtggatctgggacagatttcactctcaccatcagcagtctgcaacctgaagattttgcaacttactactgtcaacagagttacagtacccctctcactttcggcggcggaacaaaggtggagatcaag

SEQ ID NO: 124 - DNA, 732 bp, synthetic construct
  misc_feature 1..732: note = HLA-A*11 antigen binding domain
  source 1..732: mol_type = other DNA
cagatcaccctgaaagagtccggccccaccctggtgaaacccacccagaccctgaccctgacatgcaccttcagcggcttcagcctgagcacctctggcgtgggcgtgggctggatcagacagcctcccggcaaggccctggaatggctggccctgatctactggaacgacgacaagcggtacagccccagcctgaagtcccggctgaccatcaccaaggacacctcgaagaaccaggtggtgctgaccatgacaaacatggaccccgtggacaccgccacatattactgtgcacacagacacatgcgtttaagctgttttgactactggggccagggaaccctggtcaccgtgtcctcaggcggaggtggaagcggagggggaggatctggcggcggaggaagcggaggcgacatccagatgacccagtctccatcctccctgtctgcatctgtaggagacagagtcaccatcacttgccgggcaagtcagagcattagcagctatttaaattggtatcagcagaaaccagggaaagcccctaagctcctgatctatgctgcatccagtttgcaaagtggggtcccatcaaggttcagtggcagtggatctgggacagatttcactctcaccatcagcagtctgcaacctgaagattttgcaacttactactgtcaacagagttacagtacccctctcactttcggcggcggaacaaaggtggagatcaag

SEQ ID NO: 125 - DNA, 735 bp, synthetic construct
  misc_feature 1..735: note = HLA-A*11 antigen binding domain
  source 1..735: mol_type = other DNA
caggtgcagctggtgcagtctggcgccgaagtgaagaaacctggcgcctccgtgaaggtgtcctgcaaggccagcggctacaccttcaccagctacgccatgcactgggttcgacaggcccctggccagagactggaatggatgggctggatcaacgccggcaacggcaacaccaagtacagccagaaattccagggcagagtgaccatcacccgggacaccagcgccagcaccgcctacatggaactgagcagcctgcggagcgaggacaccgctgtgtattactgtgcgagagaaggaaatggtgccaaccctgatgcttttgatatctggggccaagggacaatggtcaccgtgtcctcaggcggaggtggaagcggagggggaggatctggcggcggaggaagcggaggcgacatccagatgacccagtctccatcctccctgtctgcatctgtaggagacagagtcaccatcacttgccgggcaagtcagagcattagcagctatttaaattggtatcagcagaaaccagggaaagcccctaagctcctgatctatgctgcatccagtttgcaaagtggggtcccatcaaggttcagtggcagtggatctgggacagatttcactctcaccatcagcagtctgcaacctgaagattttgcaacttactactgtcaacagagttacagtacccctctcactttcggcggcggaacaaaggtggagatcaag

SEQ ID NO: 126 - DNA, 729 bp, synthetic construct
  misc_feature 1..729: note = HLA-A*11 antigen binding domain
  source 1..729: mol_type = other DNA
gaagtgcagctggtggaaagcggcggaggcctggtgcagcctggcggcagcctgagactgtcttgcgccgccagcggcttcaccttcagcagctacgacatgcactgggtccgccaggccaccggcaagggactggaatgggtgtccgccatcggcacagccggcgacacttactaccccggcagcgtgaagggccggttcaccatcagcagagagaacgccaagaacagcctgtacctgcagatgaacagccttcgagccggcgataccgccgtgtattactgtgcaagagatctccctggtagctactggtacttcgatctctggggccgtggcaccctggtcactgtgtcctcaggcggaggtggaagcggagggggaggatctggcggcggaggaagcggaggcgacatccagatgacccagtctccatcctccctgtctgcatctgtaggagacagagtcaccatcacttgccgggcaagtcagagcattagcagctatttaaattggtatcagcagaaaccagggaaagcccctaagctcctgatctatgctgcatccagtttgcaaagtggggtcccatcaaggttcagtggcagtggatctgggacagatttcactctcaccatcagcagtctgcaacctgaagattttgcaacttactactgtcaacagagttacagtacccctctcactttcggcggcggaacaaaggtggagatcaag

SEQ ID NO: 127 - DNA, 729 bp, synthetic construct
  misc_feature 1..729: note = HLA-A*11 antigen binding domain
  source 1..729: mol_type = other DNA
caggtgcagctgcaggaaagcggccctggcctggtgaaacccagccagaccctgagcctgacctgcacagtgtccggcggctcgatcagcagcggcggctactactggtcctggatcagacagccccctggcaagggcctggaatggatcggctacatctactacagcggcagcacctactacaaccccagcctgaagtccagagtgaccatcagcgtggacaccagcaagaaccagttcagcctgaagctgagcagcgtgacagccgccgacaccgctgtgtattactgtgcgagacactactactactactacctggacgtctggggcaaagggaccacggtcaccgtgtcctcaggcggaggtggaagcggagggggaggatctggcggcggaggaagcggaggcgacatccagatgacccagtctccatcctccctgtctgcatctgtaggagacagagtcaccatcacttgccgggcaagtcagagcattagcagctatttaaattggtatcagcagaaaccagggaaagcccctaagctcctgatctatgctgcatccagtttgcaaagtggggtcccatcaaggttcagtggcagtggatctgggacagatttcactctcaccatcagcagtctgcaacctgaagattttgcaacttactactgtcaacagagttacagtacccctctcactttcggcggcggaacaaaggtggagatcaag

SEQ ID NO: 128 - DNA, 729 bp, synthetic construct
  misc_feature 1..729: note = HLA-A*11 antigen binding domain
  source 1..729: mol_type = other DNA
gaagtgcagctggtggaaagcggcggaggcctggtgcagcctggcggcagcctgagactgtcttgcgccgccagcggcttcaccttcagcagctactggatgcactgggtccgccaggcccctggcaagggactggtctgggtgtctcgaatcaacagcgacggcagcagcaccagctacgccgacagcgtgaagggccggttcaccatcagccgggacaacgccaagaacaccctgtacctgcagatgaacagcctgcgggccgaggacaccgccgtgtattactgttgtttgggtgttttattatacaactggttcgacccctggggccagggaaccctggtcaccgtgtcctcaggcggaggtggaagcggagggggaggatctggcggcggaggaagcggaggcgacatccagatgacccagtctccatcctccctgtctgcatctgtaggagacagagtcaccatcacttgccgggcaagtcagagcattagcagctatttaaattggtatcagcagaaaccagggaaagcccctaagctcctgatctatgctgcatccagtttgcaaagtggggtcccatcaaggttcagtggcagtggatctgggacagatttcactctcaccatcagcagtctgcaacctgaagattttgcaacttactactgtcaacagagttacagtacccctctcactttcggcggcggaacaaaggtggagatcaag

SEQ ID NO: 129 - DNA, 726 bp, synthetic construct
  misc_feature 1..726: note = HLA-A*11 antigen binding domain
  source 1..726: mol_type = other DNA
caggtgcagctgcaggaaagcggccctggcctggtgaaacccagccagaccctgagcctgacctgcacagtgtccggcggctcgatcagcagcggcggctactactggtcctggatcagacagccccctggcaagggcctggaatggatcggctacatctactacagcggcagcacctactacaaccccagcctgaagtccagagtgaccatcagcgtggacaccagcaagaaccagttcagcctgaagctgagcagcgtgacagccgccgacaccgctgtgtattactgtgcgagacactactactactacatggacgtctggggcaaagggaccacggtcaccgtgtcctcaggcggaggtggaagcggagggggaggatctggcggcggaggaagcggaggcgacatccagatgacccagtctccatcctccctgtctgcatctgtaggagacagagtcaccatcacttgccgggcaagtcagagcattagcagctatttaaattggtatcagcagaaaccagggaaagcccctaagctcctgatctatgctgcatccagtttgcaaagtggggtcccatcaaggttcagtggcagtggatctgggacagatttcactctcaccatcagcagtctgcaacctgaagattttgcaacttactactgtcaacagagttacagtacccctctcactttcggcggcggaacaaaggtggagatcaag

SEQ ID NO: 130 - DNA, 729 bp, synthetic construct
  misc_feature 1..729: note = HLA-A*11 antigen binding domain
  source 1..729: mol_type = other DNA
cagatcaccctgaaagagtccggccccaccctggtgaaacccacccagaccctgaccctgacatgcaccttcagcggcttcagcctgagcacctctggcgtgggcgtgggctggatcagacagcctcccggcaaggccctggaatggctggccctgatctactggaacgacgacaagcggtacagccccagcctgaagtcccggctgaccatcaccaaggacacctcgaagaaccaggtggtgctgaccatgacaaacatggaccccgtggacaccgccacatattactgtgcacacaaaacgacgtcgttttactttgactactggggccagggaaccctggtcaccgtgtcctcaggcggaggtggaagcggagggggaggatctggcggcggaggaagcggaggcgacatccagatgacccagtctccatcctccctgtctgcatctgtaggagacagagtcaccatcacttgccgggcaagtcagagcattagcagctatttaaattggtatcagcagaaaccagggaaagcccctaagctcctgatctatgctgcatccagtttgcaaagtggggtcccatcaaggttcagtggcagtggatctgggacagatttcactctcaccatcagcagtctgcaacctgaagattttgcaacttactactgtcaacagagttacagtacccctctcactttcggcggcggaacaaaggtggagatcaag

SEQ ID NO: 131 - DNA, 729 bp, synthetic construct
  misc_feature 1..729: note = HLA-A*11 antigen binding domain
  source 1..729: mol_type = other DNA
caggtgcagctgcaggaaagcggccctggcctggtgaaacccagccagaccctgagcctgacctgcacagtgtccggcggctcgatcagcagcggcggctactactggtcctggatcagacagccccctggcaagggcctggaatggatcggctacatctactacagcggcagcacctactacaaccccagcctgaagtccagagtgaccatcagcgtggacaccagcaagaaccagttcagcctgaagctgagcagcgtgacagccgccgacaccgctgtgtattactgtgcgagacactactactactactacatggacgtctggggcaaagggaccacggtcaccgtgtcctcaggcggaggtggaagcggagggggaggatctggcggcggaggaagcggaggcgacatccagatgacccagtctccatcctccctgtctgcatctgtaggagacagagtcaccatcacttgccgggcaagtcagagcattagcagctatttaaattggtatcagcagaaaccagggaaagcccctaagctcctgatctatgctgcatccagtttgcaaagtggggtcccatcaaggttcagtggcagtggatctgggacagatttcactctcaccatcagcagtctgcaacctgaagattttgcaacttactactgtcaacagagttacagtacccctctcactttcggcggcggaacaaaggtggagatcaag

SEQ ID NO: 132 - protein, 119 aa, synthetic construct
  REGION 1..119: note = anti-HLA-A*11 heavy chain
QVQLQESGPGLVKPSQTLSLTCTVSGGSISSGGYYWSWIRQPPGKGLEWIGYIYYSGSTYYNPSLKSRVTISVDTSKNQFSLKLSSVTAADTAVYYCARHYYYYSMDVWGKGTTVTVSS

SEQ ID NO: 133 - protein, 120 aa, synthetic construct
  REGION 1..120: note = anti-HLA-A*11 heavy chain
QITLKESGPTLVKPTQTLTLTCTFSGFSLSTSGVGVGWIRQPPGKALEWLALIYWNDDKRYSPSLKSRLTITKDTSKNQVVLTMTNMDPVDTATYYCAHRHMRLSCFDYWGQGTLVTVSS

SEQ ID NO: 134 - protein, 121 aa, synthetic construct
  REGION 1..121: note = anti-HLA-A*11 heavy chain
QVQLVQSGAEVKKPGASVKVSCKASGYTFTSYAMHWVRQAPGQRLEWMGWINAGNGNTKYSQKFQGRVTITRDTSASTAYMELSSLRSEDTAVYYCAREGNGANPDAFDIWGQGTMVTVSS

SEQ ID NO: 135 - protein, 119 aa, synthetic construct
  REGION 1..119: note = anti-HLA-A*11 heavy chain
EVQLVESGGGLVQPGGSLRLSCAASGFTFSSYDMHWVRQATGKGLEWVSAIGTAGDTYYPGSVKGRFTISRENAKNSLYLQMNSLRAGDTAVYYCARDLPGSYWYFDLWGRGTLVTVSS

SEQ ID NO: 136 - protein, 119 aa, synthetic construct
  REGION 1..119: note = anti-HLA-A*11 heavy chain
QVQLQESGPGLVKPSQTLSLTCTVSGGSISSGGYYWSWIRQPPGKGLEWIGYIYYSGSTYYNPSLKSRVTISVDTSKNQFSLKLSSVTAADTAVYYCARHYYYYYLDVWGKGTTVTVSS

SEQ ID NO: 137 - protein, 119 aa, synthetic construct
  REGION 1..119: note = anti-HLA-A*11 heavy chain
EVQLVESGGGLVQPGGSLRLSCAASGFTFSSYWMHWVRQAPGKGLVWVSRINSDGSSTSYADSVKGRFTISRDNAKNTLYLQMNSLRAEDTAVYYCCLGVLLYNWFDPWGQGTLVTVSS

SEQ ID NO: 138 - protein, 118 aa, synthetic construct
  REGION 1..118: note = anti-HLA-A*11 heavy chain
QVQLQESGPGLVKPSQTLSLTCTVSGGSISSGGYYWSWIRQPPGKGLEWIGYIYYSGSTYYNPSLKSRVTISVDTSKNQFSLKLSSVTAADTAVYYCARHYYYYMDVWGKGTTVTVSS

SEQ ID NO: 139 - protein, 119 aa, synthetic construct
  REGION 1..119: note = anti-HLA-A*11 heavy chain
QITLKESGPTLVKPTQTLTLTCTFSGFSLSTSGVGVGWIRQPPGKALEWLALIYWNDDKRYSPSLKSRLTITKDTSKNQVVLTMTNMDPVDTATYYCAHKTTSFYFDYWGQGTLVTVSS

SEQ ID NO: 140 - protein, 119 aa, synthetic construct
  REGION 1..119: note = anti-HLA-A*11 heavy chain
QVQLQESGPGLVKPSQTLSLTCTVSGGSISSGGYYWSWIRQPPGKGLEWIGYIYYSGSTYYNPSLKSRVTISVDTSKNQFSLKLSSVTAADTAVYYCARHYYYYYMDVWGKGTTVTVSS

SEQ ID NO: 141 - protein, 107 aa, synthetic construct [sequence omitted]

SEQ ID NO: 142 - DNA, 357 bp, synthetic construct
  misc_feature 1..357: note = anti-HLA-A*11 heavy chain
  source 1..357: mol_type = other DNA
caggtgcagctgcaggaaagcggccctggcctggtgaaacccagccagaccctgagcctgacctgcacagtgtccggcggctcgatcagcagcggcggctactactggtcctggatcagacagccccctggcaagggcctggaatggatcggctacatctactacagcggcagcacctactacaaccccagcctgaagtccagagtgaccatcagcgtggacaccagcaagaaccagttcagcctgaagctgagcagcgtgacagccgccgacaccgctgtgtattactgtgcgagacactactactactactccatggacgtctggggcaaagggaccacggtcaccgtgtcctca

SEQ ID NO: 143 - DNA, 360 bp, synthetic construct
  misc_feature 1..360: note = anti-HLA-A*11 heavy chain
  source 1..360: mol_type = other DNA
cagatcaccctgaaagagtccggccccaccctggtgaaacccacccagaccctgaccctgacatgcaccttcagcggcttcagcctgagcacctctggcgtgggcgtgggctggatcagacagcctcccggcaaggccctggaatggctggccctgatctactggaacgacgacaagcggtacagccccagcctgaagtcccggctgaccatcaccaaggacacctcgaagaaccaggtggtgctgaccatgacaaacatggaccccgtggacaccgccacatattactgtgcacacagacacatgcgtttaagctgttttgactactggggccagggaaccctggtcaccgtgtcctca

SEQ ID NO: 144 - DNA, 363 bp, synthetic construct
  misc_feature 1..363: note = anti-HLA-A*11 heavy chain
  source 1..363: mol_type = other DNA
caggtgcagctggtgcagtctggcgccgaagtgaagaaacctggcgcctccgtgaaggtgtcctgcaaggccagcggctacaccttcaccagctacgccatgcactgggttcgacaggcccctggccagagactggaatggatgggctggatcaacgccggcaacggcaacaccaagtacagccagaaattccagggcagagtgaccatcacccgggacaccagcgccagcaccgcctacatggaactgagcagcctgcggagcgaggacaccgctgtgtattactgtgcgagagaaggaaatggtgccaaccctgatgcttttgatatctggggccaagggacaatggtcaccgtgtcctca

SEQ ID NO: 145 - DNA, 357 bp, synthetic construct
  misc_feature 1..357: note = anti-HLA-A*11 heavy chain
  source 1..357: mol_type = other DNA
gaagtgcagctggtggaaagcggcggaggcctggtgcagcctggcggcagcctgagactgtcttgcgccgccagcggcttcaccttcagcagctacgacatgcactgggtccgccaggccaccggcaagggactggaatgggtgtccgccatcggcacagccggcgacacttactaccccggcagcgtgaagggccggttcaccatcagcagagagaacgccaagaacagcctgtacctgcagatgaacagccttcgagccggcgataccgccgtgtattactgtgcaagagatctccctggtagctactggtacttcgatctctggggccgtggcaccctggtcactgtgtcctca

SEQ ID NO: 146 - DNA, 357 bp, synthetic construct
  misc_feature 1..357: note = anti-HLA-A*11 heavy chain
  source 1..357: mol_type = other DNA
caggtgcagctgcaggaaagcggccctggcctggtgaaacccagccagaccctgagcctgacctgcacagtgtccggcggctcgatcagcagcggcggctactactggtcctggatcagacagccccctggcaagggcctggaatggatcggctacatctactacagcggcagcacctactacaaccccagcctgaagtccagagtgaccatcagcgtggacaccagcaagaaccagttcagcctgaagctgagcagcgtgacagccgccgacaccgctgtgtattactgtgcgagacactactactactactacctggacgtctggggcaaagggaccacggtcaccgtgtcctca

SEQ ID NO: 147 - DNA, 357 bp, synthetic construct
  misc_feature 1..357: note = anti-HLA-A*11 heavy chain
  source 1..357: mol_type = other DNA
gaagtgcagctggtggaaagcggcggaggcctggtgcagcctggcggcagcctgagactgtcttgcgccgccagcggcttcaccttcagcagctactggatgcactgggtccgccaggcccctggcaagggactggtctgggtgtctcgaatcaacagcgacggcagcagcaccagctacgccgacagcgtgaagggccggttcaccatcagccgggacaacgccaagaacaccctgtacctgcagatgaacagcctgcgggccgaggacaccgccgtgtattactgttgtttgggtgttttattatacaactggttcgacccctggggccagggaaccctggtcaccgtgtcctca

SEQ ID NO: 148 - DNA, 354 bp, synthetic construct
  misc_feature 1..354: note = anti-HLA-A*11 heavy chain
  source 1..354: mol_type = other DNA
caggtgcagctgcaggaaagcggccctggcctggtgaaacccagccagaccctgagcctgacctgcacagtgtccggcggctcgatcagcagcggcggctactactggtcctggatcagacagccccctggcaagggcctggaatggatcggctacatctactacagcggcagcacctactacaaccccagcctgaagtccagagtgaccatcagcgtggacaccagcaagaaccagttcagcctgaagctgagcagcgtgacagccgccgacaccgctgtgtattactgtgcgagacactactactactacatggacgtctggggcaaagggaccacggtcaccgtgtcctca

SEQ ID NO: 149 - DNA, 357 bp, synthetic construct
  misc_feature 1..357: note = anti-HLA-A*11 heavy chain
  source 1..357: mol_type = other DNA
cagatcaccctgaaagagtccggccccaccctggtgaaacccacccagaccctgaccctgacatgcaccttcagcggcttcagcctgagcacctctggcgtgggcgtgggctggatcagacagcctcccggcaaggccctggaatggctggccctgatctactggaacgacgacaagcggtacagccccagcctgaagtcccggctgaccatcaccaaggacacctcgaagaaccaggtggtgctgaccatgacaaacatggaccccgtggacaccgccacatattactgtgcacacaaaacgacgtcgttttactttgactactggggccagggaaccctggtcaccgtgtcctca

SEQ ID NO: 150 - DNA, 357 bp, synthetic construct
  misc_feature 1..357: note = anti-HLA-A*11 heavy chain
  source 1..357: mol_type = other DNA
caggtgcagctgcaggaaagcggccctggcctggtgaaacccagccagaccctgagcctgacctgcacagtgtccggcggctcgatcagcagcggcggctactactggtcctggatcagacagccccctggcaagggcctggaatggatcggctacatctactacagcggcagcacctactacaaccccagcctgaagtccagagtgaccatcagcgtggacaccagcaagaaccagttcagcctgaagctgagcagcgtgacagccgccgacaccgctgtgtattactgtgcgagacactactactactactacatggacgtctggggcaaagggaccacggtcaccgtgtcctca

SEQ ID NO: 151 - DNA, 321 bp, synthetic construct
  misc_feature 1..321: note = anti-HLA-A*11 light chain
  source 1..321: mol_type = other DNA
gacatccagatgacccagtctccatcctccctgtctgcatctgtaggagacagagtcaccatcacttgccgggcaagtcagagcattagcagctatttaaattggtatcagcagaaaccagggaaagcccctaagctcctgatctatgctgcatccagtttgcaaagtggggtcccatcaaggttcagtggcagtggatctgggacagatttcactctcaccatcagcagtctgcaacctgaagattttgcaacttactactgtcaacagagttacagtacccctctcactttcggcggcggaacaaaggtggagatcaag

SEQ ID NO: 152 - protein, 17 aa, synthetic construct
  REGION 1..17: note = linker
GGGGSGGGGSGGGGSGG

SEQ ID NO: 153 - protein, 66 aa, unidentified
  REGION 1..66: note = encodes signal sequence
ATGGACATGAGGGTCCCCGCTCAGCTCCTGGGGCTCCTGCTACTCTGGCTCCGAGGTGCCAGATGT

SEQ ID NO: 154 - protein, 245 aa, synthetic construct
  REGION 1..245: note = MSLN scFv domain
EVQLVESGGGLVKPGGSLRLSCAASGFTFSNAWMSWVRQAPGKGLEWVGRIKSKTDGGTTDYAAPVKGRFTISRDDSKNTLYLQMNSLKTEDTAVYYCTTDLPKLRNFHIWGQGTLVTVSSGGGGSGGGGSGGGGSGGDIQMTQSPSSLSASVGDRVTITCRASQSISSYLNWYQQKPGKAPKLLIYAASSLQSGVPSRFSGSGSGTDFTLTISSLQPEDFATYYCQQSYSTPLTFGGGTKVEIK

SEQ ID NO: 155 - protein, 248 aa, synthetic construct
  REGION 1..248: note = MSLN scFv domain
EVQLVESGGGLVQPGGSLRLSCAASGFTFSSYAMHWVRQAPGKGLEYVSAISSNGGSTYYANSVKGRFTISRDNSKNTLYLQMGSLRAEDMAVYYCASLEYHGFRQYGLRYWHWGQGTLVTVSSGGGGSGGGGSGGGGSGGDIQMTQSPSSLSASVGDRVTITCRASQSISSYLNWYQQKPGKAPKLLIYAASSLQSGVPSRFSGSGSGTDFTLTISSLQPEDFATYYCQQSYSTPLTFGGGTKVEIK

SEQ ID NO: 156 - protein, 247 aa, synthetic construct
  REGION 1..247: note = MSLN scFv domain
QLQLQESGSGLVKPSQTLSLTCAVSGGSISSGGYSWSWIRQPPGKGLEWIGYIYHSGSTYYNPSLKSRVTISVDRSKNQFSLKLSSVTAADTAVYYCASIKFWFAGINYFFPWGQGTLVTVSSGGGGSGGGGSGGGGSGGDIQMTQSPSSLSASVGDRVTITCRASQSISSYLNWYQQKPGKAPKLLIYAASSLQSGVPSRFSGSGSGTDFTLTISSLQPEDFATYYCQQSYSTPLTFGGGTKVEIK

SEQ ID NO: 157 - protein, 243 aa, synthetic construct
  REGION 1..243: note = MSLN scFv domain
EVQLVESGGGLVQPGGSLRLSCAASGFTFSSYWMHWVRQAPGKGLVWVSRINSDGSSTSYADSVKGRFTISRDNAKNTLYLQMNSLRAEDTAVYYCASGFLGMGSNFIWGQGTLVTVSSGGGGSGGGGSGGGGSGGDIQMTQSPSSLSASVGDRVTITCRASQSISSYLNWYQQKPGKAPKLLIYAASSLQSGVPSRFSGSGSGTDFTLTISSLQPEDFATYYCQQSYSTPLTFGGGTKVEIK

SEQ ID NO: 158 - protein, 243 aa, synthetic construct
  REGION 1..243: note = MSLN scFv domain
QVQLQESGPGLVKPSQTLSLTCTVSGGSISSGGYYWSWIRQHPGKGLEWIGYIYYSGSTYYNPSLKSLVTISVDTSKNQFSLKLSSVTAADTAVYYCASGDRARYFDLWGRGTLVTVSSGGGGSGGGGSGGGGSGGDIQMTQSPSSLSASVGDRVTITCRASQSISSYLNWYQQKPGKAPKLLIYAASSLQSGVPSRFSGSGSGTDFTLTISSLQPEDFATYYCQQSYSTPLTFGGGTKVEIK

SEQ ID NO: 159 - protein, 247 aa, synthetic construct
  REGION 1..247: note = MSLN scFv domain
EVQLVESGGGLVQPGGSLRLSCAASGFTFSSYWMHWVRQAPGKGLVWVSRINSDGSSTSYADSVKGRFTISRDNAKNTLYLQMNSLRAEDTAVYYCARYPRGYHQMVDAFDIWGQGTMVTVSSGGGGSGGGGSGGGGSGGDIQMTQSPSSLSASVGDRVTITCRASQSISSYLNWYQQKPGKAPKLLIYAASSLQSGVPSRFSGSGSGTDFTLTISSLQPEDFATYYCQQSYSTPLTFGGGTKVEIK

SEQ ID NO: 160 - protein, 250 aa, synthetic construct
  REGION 1..250: note = MSLN scFv domain
QLQLQESGPGLVKPSETLSLTCTVSGGSISSSSYYWGWIRQPPGKGLEWIGSIYYSGSTYYNPSLKSRVTISVDTSKNQFSLKLSSVTAADTAVYYCARVRFLAARTTIPEANFLWGQGTLVTVSSGGGGSGGGGSGGGGSGGDIQMTQSPSSLSASVGDRVTITCRASQSISSYLNWYQQKPGKAPKLLIYAASSLQSGVPSRFSGSGSGTDFTLTISSLQPEDFATYYCQQSYSTPLTFGGGTKVEIK

SEQ ID NO: 161 - protein, 242 aa, synthetic construct
  REGION 1..242: note = MSLN scFv domain
EVQLVESGGGLVQPGGSLRLSCAASGFTFSSYSMNWVRQAPGKGLEWVSYISSSSSTIYYADSVKGRFTISRDNAKNSLYLQMNSLRAEDTAVYYCARVLSRARFDYWGQGTLVTVSSGGGGSGGGGSGGGGSGGDIQMTQSPSSLSASVGDRVTITCRASQSISSYLNWYQQKPGKAPKLLIYAASSLQSGVPSRFSGSGSGTDFTLTISSLQPEDFATYYCQQSYSTPLTFGGGTKVEIK

SEQ ID NO: 162 - protein, 241 aa, synthetic construct
  REGION 1..241: note = MSLN scFv domain
EVQLVESGGGLVKPGGSLRLSCAASGFTFSSYSMNWVRQAPGKGLEWVSSISSSSSYIYYADSVKGRFTISRDNAKNSLYLQMNSLRAEDTAVYYCARLRGRVFDPWGQGTLVTVSSGGGGSGGGGSGGGGSGGDIQMTQSPSSLSASVGDRVTITCRASQSISSYLNWYQQKPGKAPKLLIYAASSLQSGVPSRFSGSGSGTDFTLTISSLQPEDFATYYCQQSYSTPLTFGGGTKVEIK

SEQ ID NO: 163 - protein, 247 aa, synthetic construct
  REGION 1..247: note = MSLN scFv domain
QLQLQESGPGLVKPSETLSLTCTVSGGSISSSSYYWGWIRQPPGKGLEWIGSIYYSGSTYYNPSLKSRVTISVDTSKNQFSLKLSSVTAADTAVYYCARIKFTSFLYVHGFLWGQGTLVTVSSGGGGSGGGGSGGGGSGGDIQMTQSPSSLSASVGDRVTITCRASQSISSYLNWYQQKPGKAPKLLIYAASSLQSGVPSRFSGSGSGTDFTLTISSLQPEDFATYYCQQSYSTPLTFGGGTKVEIK

SEQ ID NO: 164 - protein, 246 aa, synthetic construct
  REGION 1..246: note = MSLN scFv domain
QVQLVQSGAEVKKPGASVKVSCKASGYTFTSYAMHWVRQAPGQRLEWMGWINAGNGNTKYSQKFQGRVTITRDTSASTAYMELSSLRSEDTAVYYCARGQRWLYLGGIRRHWGQGTLVTVSSGGGGSGGGGSGGGGSGGDIQMTQSPSSLSASVGDRVTITCRASQSISSYLNWYQQKPGKAPKLLIYAASSLQSGVPSRFSGSGSGTDFTLTISSLQPEDFATYYCQQSYSTPLTFGGGTKVEIK

SEQ ID NO: 165 - protein, 244 aa, synthetic construct
  REGION 1..244: note = MSLN scFv domain
QVQLQESGPGLVKPSETLSLTCTVSGGSISSYYWSWIRQPPGKGLEWIGYIYYSGSTNYNPSLKSRVTISVDTSKNQFSLKLSSVTAADTAVYYCAREWIPSRPYYFDYWGQGTLVTVSSGGGGSGGGGSGGGGSGGDIQMTQSPSSLSASVGDRVTITCRASQSISSYLNWYQQKPGKAPKLLIYAASSLQSGVPSRFSGSGSGTDFTLTISSLQPEDFATYYCQQSYSTPLTFGGGTKVEIK

SEQ ID NO: 166 - protein, 244 aa, synthetic construct
  REGION 1..244: note = MSLN scFv domain
QVQLQESGPGLVKPSQTLSLTCTVSGGSISSGGYYWSWIRQPPGKGLEWIGYIYYSGSTYYNPSLKSRVTISVDTSKNQFSLKLSSVTAADTAVYYCARESTGTGAFDIWGQGTMVTVSSGGGGSGGGGSGGGGSGGDIQMTQSPSSLSASVGDRVTITCRASQSISSYLNWYQQKPGKAPKLLIYAASSLQSGVPSRFSGSGSGTDFTLTISSLQPEDFATYYCQQSYSTPLTFGGGTKVEIK

SEQ ID NO: 167 - protein, 246 aa, synthetic construct
  REGION 1..246: note = MSLN scFv domain
EVQLVESGGGVVRPGGSLRLSCAASGFTFDDYGMSWVRQAPGKGLEWVSGINWNGGSTGYADSVKGRFTISRDNAKNSLYLQMNSLRAEDTALYHCARERYRRVLHWYFDLWGRGTLVTVSSGGGGSGGGGSGGGGSGGDIQMTQSPSSLSASVGDRVTITCRASQSISSYLNWYQQKPGKAPKLLIYAASSLQSGVPSRFSGSGSGTDFTLTISSLQPEDFATYYCQQSYSTPLTFGGGTKVEIK

SEQ ID NO: 168 - protein, 240 aa, synthetic construct
  REGION 1..240: note = MSLN scFv domain
QVQLVQSGAEVKKPGASVKVSCKASGYTFTSYDINWVRQATGQGLEWMGWMNPNSGNTGYAQKFQGRVTMTRNTSISTAYMELSSLRSEDTAVYYCAREPDAFDIWGQGTMVTVSSGGGGSGGGGSGGGGSGGDIQMTQSPSSLSASVGDRVTITCRASQSISSYLNWYQQKPGKAPKLLIYAASSLQSGVPSRFSGSGSGTDFTLTISSLQPEDFATYYCQQSYSTPLTFGGGTKVEIK

SEQ ID NO: 169 - protein, 246 aa, synthetic construct
  REGION 1..246: note = MSLN scFv domain
QVQLQESGPGLVKPSQTLSLTCTVSGGSISSGGYYWSWIRQPPGKGLEWIGYIYYSGSTYYNPSLKSRVTISVDTSKNQFSLKLSSVTAADTAVYYCAREHMGTIPYYFDYWGQGTLVTVSSGGGGSGGGGSGGGGSGGDIQMTQSPSSLSASVGDRVTITCRASQSISSYLNWYQQKPGKAPKLLIYAASSLQSGVPSRFSGSGSGTDFTLTISSLQPEDFATYYCQQSYSTPLTFGGGTKVEIK

SEQ ID NO: 170 - protein, 244 aa, synthetic construct
  REGION 1..244: note = MSLN scFv domain
QVQLQESGPGLVKPSQTLSLTCTVSGGSISSGGYYWSWIRQPPGKGLEWIGYIYYSGSTYYNPSLKSRVTISVDTSKNQFSLKLSSVTAADTAVYYCAREEFGYGDVLYWGQGTLVTVSSGGGGSGGGGSGGGGSGGDIQMTQSPSSLSASVGDRVTITCRASQSISSYLNWYQQKPGKAPKLLIYAASSLQSGVPSRFSGSGSGTDFTLTISSLQPEDFATYYCQQSYSTPLTFGGGTKVEIK

SEQ ID NO: 171 - protein, 244 aa, synthetic construct
  REGION 1..244: note = MSLN scFv domain
QVQLQESGPGLVKPSQTLSLTCTVSGGSISSGDYYWSWIRQPPGKGLEWIGYIYYSGSTYYNPSLKSRVTISVDTSKNQFSLKLSSVTAADTAVYYCAREDVVKGAFDIWGQGTMVTVSSGGGGSGGGGSGGGGSGGDIQMTQSPSSLSASVGDRVTITCRASQSISSYLNWYQQKPGKAPKLLIYAASSLQSGVPSRFSGSGSGTDFTLTISSLQPEDFATYYCQQSYSTPLTFGGGTKVEIK

SEQ ID NO: 172 - protein, 245 aa, synthetic construct
  REGION 1..245: note = MSLN scFv domain
EVQLVESGGGLVQPGGSLRLSCAASGFTFSSYSMNWVRQAPGKGLEWVSYISSSSSTIYYADSVKGRFTISRDNAKNSLYLQMNSLRAEDTAVYYCAREDFSHKLGYFQHWGQGTLVTVSSGGGGSGGGGSGGGGSGGDIQMTQSPSSLSASVGDRVTITCRASQSISSYLNWYQQKPGKAPKLLIYAASSLQSGVPSRFSGSGSGTDFTLTISSLQPEDFATYYCQQSYSTPLTFGGGTKVEIK

SEQ ID NO: 173 - protein, 238 aa, synthetic construct
  REGION 1..238: note = MSLN scFv domain
QVQLVESGGGLVKPGGSLRLSCAASGFTFSDYYMSWIRQAPGKGLEWVSYISSSGSTIYYADSVKGRFTISRDNAKNSLYLQMNSLRAEDTAVYYCARDYDYVWGQGTLVTVSSGGGGSGGGGSGGGGSGGDIQMTQSPSSLSASVGDRVTITCRASQSISSYLNWYQQKPGKAPKLLIYAASSLQSGVPSRFSGSGSGTDFTLTISSLQPEDFATYYCQQSYSTPLTFGGGTKVEIK

SEQ ID NO: 174 - protein, 244 aa, synthetic construct
  REGION 1..244: note = MSLN scFv domain
QVQLQESGPGLVKPSQTLSLTCTVSGGSISSGDYYWSWIRQPPGKGLEWIGYIYYSGSTYYNPSLKSRVTISVDTSKNQFSLKLSSVTAADTAVYYCARDRRDWDWFDPWGQGTLVTVSSGGGGSGGGGSGGGGSGGDIQMTQSPSSLSASVGDRVTITCRASQSISSYLNWYQQKPGKAPKLLIYAASSLQSGVPSRFSGSGSGTDFTLTISSLQPEDFATYYCQQSYSTPLTFGGGTKVEIK

SEQ ID NO: 175 - protein, 243 aa, synthetic construct
  REGION 1..243: note = MSLN scFv domain
QVQLQESGPGLVKPSGTLSLTCAVSGGSISSSNWWSWVRQPPGKGLEWIGEIYHSGSTNYNPSLKSRVTISVDKSKNQFSLKLSSVTAADTAVYYCARDQQALKYRVDWGQGTLVTVSSGGGGSGGGGSGGGGSGGDIQMTQSPSSLSASVGDRVTITCRASQSISSYLNWYQQKPGKAPKLLIYAASSLQSGVPSRFSGSGSGTDFTLTISSLQPEDFATYYCQQSYSTPLTFGGGTKVEIK

SEQ ID NO: 176 - protein, 242 aa, synthetic construct
  REGION 1..242: note = MSLN scFv domain
QVQLVQSGAEVKKPGASVKVSCKASGYTFTSYGISWVRQAPGQGLEWMGWISAYNGNTNYAQKLQGRVTMTTDTSTSTAYMELRSLRSDDTAVYYCARDLTLGCFDYWGQGTLVTVSSGGGGSGGGGSGGGGSGGDIQMTQSPSSLSASVGDRVTITCRASQSISSYLNWYQQKPGKAPKLLIYAASSLQSGVPSRFSGSGSGTDFTLTISSLQPEDFATYYCQQSYSTPLTFGGGTKVEIK

SEQ ID NO: 177 - protein, 242 aa, synthetic construct
  REGION 1..242: note = MSLN scFv domain
EVQLVESGGGLVQPGGSLRLSCAASGFTVSSNYMSWVRQAPGKGLEWVSVIYSGGSTYYADSVKGRFTISRDNSKNTLYLQMNSLRAEDTAVYYCARDGSNSWYFDLWGRGTLVTVSSGGGGSGGGGSGGGGSGGDIQMTQSPSSLSASVGDRVTITCRASQSISSYLNWYQQKPGKAPKLLIYAASSLQSGVPSRFSGSGSGTDFTLTISSLQPEDFATYYCQQSYSTPLTFGGGTKVEIK

SEQ ID NO: 178 - protein, 242 aa, synthetic construct
  REGION 1..242: note = MSLN scFv domain
QVQLVESGGGVVQPGRSLRLSCAASGFTFSSYGMHWVRQAPGKGLEWVAVIWYDGSNKYYADSVKGRFTISRDNSKNTLYLQMNSLRAEDTAVYYCARAFLFLSFSVWGQGTLVTVSSGGGGSGGGGSGGGGSGGDIQMTQSPSSLSASVGDRVTITCRASQSISSYLNWYQQKPGKAPKLLIYAASSLQSGVPSRFSGSGSGTDFTLTISSLQPEDFATYYCQQSYSTPLTFGGGTKVEIK

SEQ ID NO: 179 - protein, 245 aa, synthetic construct
  REGION 1..245: note = MSLN scFv domain
EVQLVESGGVVVQPGGSLRLSCAASGFTFDDYTMHWVRQAPGKGLEWVSLISWDGGSTYYADSVKGRFTISRDNSKNSLYLQMNSLRTEDTALYYCAKGIFYSSKEDFDYWGQGTLVTVSSGGGGSGGGGSGGGGSGGDIQMTQSPSSLSASVGDRVTITCRASQSISSYLNWYQQKPGKAPKLLIYAASSLQSGVPSRFSGSGSGTDFTLTISSLQPEDFATYYCQQSYSTPLTFGGGTKVEIK

SEQ ID NO: 180 - protein, 248 aa, synthetic construct
  REGION 1..248: note = MSLN scFv domain
EVQLVESGGVVVQPGGSLRLSCAASGFTFDDYTMHWVRQAPGKGLEWVSLISWDGGSTYYADSVKGRFTISRDNSKNSLYLQMNSLRTEDTALYYCAKDIWIFYSSNPKPTVYWGQGTLVTVSSGGGGSGGGGSGGGGSGGDIQMTQSPSSLSASVGDRVTITCRASQSISSYLNWYQQKPGKAPKLLIYAASSLQSGVPSRFSGSGSGTDFTLTISSLQPEDFATYYCQQSYSTPLTFGGGTKVEIK

SEQ ID NO: 181 - protein, 246 aa, synthetic construct
  REGION 1..246: note = MSLN scFv domain
QVQLVQSGSELKKPGASVKVSCKASGYTFTSYAMNWVRQAPGQGLEWMGWINTNTGNPTYAQGFTGRFVFSFDTSVSTAYLQICSLKAEDTAVYYCARKDQTLTYGNWFDPWGQGTLVTVSSGGGGSGGGGSGGGGSGGDIQMTQSPSSLSASVGDRVTITCRASQSISSYLNWYQQKPGKAPKLLIYAASSLQSGVPSRFSGSGSGTDFTLTISSLQPEDFATYYCQQSYSTPLTFGGGTKVEIK

SEQ ID NO: 182 - protein, 242 aa, synthetic construct
  REGION 1..242: note = MSLN scFv domain
QVQLQESGPGLVKPSETLSLTCTVSGGSVSSGSYYWSWIRQPPGKGLEWIGYIYYSGSTNYNPSLKSRVTISVDTSKNQFSLKLSSVTAADTAVYYCARDHYERGLYWGQGTLVTVSSGGGGSGGGGSGGGGSGGDIQMTQSPSSLSASVGDRVTITCRASQSISSYLNWYQQKPGKAPKLLIYAASSLQSGVPSRFSGSGSGTDFTLTISSLQPEDFATYYCQQSYSTPLTFGGGTKVEIK

SEQ ID NO: 183 - protein, 242 aa, synthetic construct
  REGION 1..242: note = MSLN scFv domain
QVQLVESGGGLVKPGGSLRLSCAASGFTFSDYYMSWIRQAPGKGLEWVSYISSSGSTIYYADSVKGRFTISRDNAKNSLYLQMNSLRAEDTAVYYCARYMYNWYFDLWGRGTLVTVSSGGGGSGGGGSGGGGSGGDIQMTQSPSSVSASVGDRVTITCRASQGISSWLAWYQQKPGKAPKLLIYAASSLQSGVPSRFSGSGSGTDFTLTISSLQPEDFATYYCQQANSFPLTFGGGTKVEIK

SEQ ID NO: 184 - protein, 241 aa, synthetic construct
  REGION 1..241: note = MSLN scFv domain
QVQLVESGGGLVKPGGSLRLSCAASGFTFSDYYMSWIRQAPGKGLEWVSYISSSGSTIYYADSVKGRFTISRDNAKNSLYLQMNSLRAEDTAVYYCARDRRPAFDIWGQGTMVTVSSGGGGSGGGGSGGGGSGGDIQMTQSPSSVSASVGDRVTITCRASQGISSWLAWYQQKPGKAPKLLIYAASSLQSGVPSRFSGSGSGTDFTLTISSLQPEDFATYYCQQANSFPLTFGGGTKVEIK

SEQ ID NO: 185 - protein, 243 aa, synthetic construct
  REGION 1..243: note = MSLN scFv domain
QVQLVESGGGLVKPGGSLRLSCAASGFTFSDYYMSWIRQAPGKGLEWVSYISSSGSTIYYADSVKGRFTISRDNAKNSLYLQMNSLRAEDTAVYYCAVHLKRRPYFDYWGQGTLVTVSSGGGGSGGGGSGGGGSGGAIQLTQSPSSLSASVGDRVTITCRASQGISSALAWYQQKPGKAPKLLIYDASSLESGVPSRFSGSGSGTDFTLTISSLQPEDFATYYCQQFNSYPLTFGGGTKVEIK

SEQ ID NO: 186 - protein, 242 aa, synthetic construct
  REGION 1..242: note = MSLN scFv domain
QVQLVESGGGLVKPGGSLRLSCAASGFTFSDYYMSWIRQAPGKGLEWVSYISSSGSTIYYADSVKGRFTISRDNAKNSLYLQMNSLRAEDTAVYYCASVHKKPIFDYWGQGTLVTVSSGGGGSGGGGSGGGGSGGAIQLTQSPSSLSASVGDRVTITCRASQGISSALAWYQQKPGKAPKLLIYDASSLESGVPSRFSGSGSGTDFTLTISSLQPEDFATYYCQQFNSYPLTFGGGTKVEIK

SEQ ID NO: 187 - protein, 242 aa, synthetic construct
  REGION 1..242: note = MSLN scFv domain
QVQLVESGGGLVKPGGSLRLSCAASGFTFSDYYMSWIRQAPGKGLEWVSYISSSGSTIYYADSVKGRFTISRDNAKNSLYLQMNSLRAEDTAVYYCASTSRRCTFQHWGQGTLVTVSSGGGGSGGGGSGGGGSGGAIQLTQSPSSLSASVGDRVTITCRASQGISSALAWYQQKPGKAPKLLIYDASSLESGVPSRFSGSGSGTDFTLTISSLQPEDFATYYCQQFNSYPLTFGGGTKVEIK

SEQ ID NO: 188 - protein, 242 aa, synthetic construct
  REGION 1..242: note = MSLN scFv domain
QVQLVESGGGLVKPGGSLRLSCAASGFTFSDYYMSWIRQAPGKGLEWVSYISSSGSTIYYADSVKGRFTISRDNAKNSLYLQMNSLRAEDTAVYYCASTSPRPLFQHWGQGTLVTVSSGGGGSGGGGSGGGGSGGAIQLTQSPSSLSASVGDRVTITCRASQGISSALAWYQQKPGKAPKLLIYDASSLESGVPSRFSGSGSGTDFTLTISSLQPEDFATYYCQQFNSYPLTFGGGTKVEIK

SEQ ID NO: 189 - protein, 244 aa, synthetic construct
  REGION 1..244: note = MSLN scFv domain
QVQLVESGGGLVKPGGSLRLSCAASGFTFSDYYMSWIRQAPGKGLEWVSYISSSGSTIYYADSVKGRFTISRDNAKNSLYLQMNSLRAEDTAVYYCASPYQVRGVYFDYWGQGTLVTVSSGGGGSGGGGSGGGGSGGAIQLTQSPSSLSASVGDRVTITCRASQGISSALAWYQQKPGKAPKLLIYDASSLESGVPSRFSGSGSGTDFTLTISSLQPEDFATYYCQQFNSYPLTFGGGTKVEIK

SEQ ID NO: 190 - protein, 244 aa, synthetic construct
  REGION 1..244: note = MSLN scFv domain
QVQLVESGGGLVKPGGSLRLSCAASGFTFSDYYMSWIRQAPGKGLEWVSYISSSGSTIYYADSVKGRFTISRDNAKNSLYLQMNSLRAEDTAVYYCASPYKKRRTVFDYWGQGTLVTVSSGGGGSGGGGSGGGGSGGAIQLTQSPSSLSASVGDRVTITCRASQGISSALAWYQQKPGKAPKLLIYDASSLESGVPSRFSGSGSGTDFTLTISSLQPEDFATYYCQQFNSYPLTFGGGTKVEIK

SEQ ID NO: 191 - protein, 243 aa, synthetic construct
  REGION 1..243: note = MSLN scFv domain
QVQLVESGGGLVKPGGSLRLSCAASGFTFSDYYMSWIRQAPGKGLEWVSYISSSGSTIYYADSVKGRFTISRDNAKNSLYLQMNSLRAEDTAVYYCASLQRGLALFQHWGQGTLVTVSSGGGGSGGGGSGGGGSGGAIQLTQSPSSLSASVGDRVTITCRASQGISSALAWYQQKPGKAPKLLIYDASSLESGVPSRFSGSGSGTDFTLTISSLQPEDFATYYCQQFNSYPLTFGGGTKVEIK

SEQ ID NO: 192 - protein, 242 aa, synthetic construct
  REGION 1..242: note = MSLN scFv domain
QVQLVESGGGLVKPGGSLRLSCAASGFTFSDYYMSWIRQAPGKGLEWVSYISSSGSTIYYADSVKGRFTISRDNAKNSLYLQMNSLRAEDTAVYYCASILSVPYFDLWGRGTLVTVSSGGGGSGGGGSGGGGSGGAIQLTQSPSSLSASVGDRVTITCRASQGISSALAWYQQKPGKAPKLLIYDASSLESGVPSRFSGSGSGTDFTLTISSLQPEDFATYYCQQFNSYPLTFGGGTKVEIK

SEQ ID NO: 193 - protein, 247 aa, synthetic construct
  REGION 1..247: note = MSLN scFv domain
QVQLVESGGGLVKPGGSLRLSCAASGFTFSDYYMSWIRQAPGKGLEWVSYISSSGSTIYYADSVKGRFTISRDNAKNSLYLQMNSLRAEDTAVYYCASGWIRVPLRLPLFQHWGQGTLVTVSSGGGGSGGGGSGGGGSGGAIQLTQSPSSLSASVGDRVTITCRASQGISSALAWYQQKPGKAPKLLIYDASSLESGVPSRFSGSGSGTDFTLTISSLQPEDFATYYCQQFNSYPLTFGGGTKVEIK

SEQ ID NO: 194 - protein, 242 aa, synthetic construct
  REGION 1..242: note = MSLN scFv domain
QVQLVESGGGLVKPGGSLRLSCAASGFTFSDYYMSWIRQAPGKGLEWVSYISSSGSTIYYADSVKGRFTISRDNAKNSLYLQMNSLRAEDTAVYYCARVTIFAIFDIWGQGTMVTVSSGGGGSGGGGSGGGGSGGAIQLTQSPSSLSASVGDRVTITCRASQGISSALAWYQQKPGKAPKLLIYDASSLESGVPSRFSGSGSGTDFTLTISSLQPEDFATYYCQQFNSYPLTFGGGTKVEIK

SEQ ID NO: 195 - protein, 243 aa, synthetic construct
  REGION 1..243: note = MSLN scFv domain
QVQLVESGGGLVKPGGSLRLSCAASGFTFSDYYMSWIRQAPGKGLEWVSYISSSGSTIYYADSVKGRFTISRDNAKNSLYLQMNSLRAEDTAVYYCARVGRGFVHFDLWGRGTLVTVSSGGGGSGGGGSGGGGSGGAIQLTQSPSSLSASVGDRVTITCRASQGISSALAWYQQKPGKAPKLLIYDASSLESGVPSRFSGSGSGTDFTLTISSLQPEDFATYYCQQFNSYPLTFGGGTKVEIK

SEQ ID NO: 196 - protein, 244 aa, synthetic construct
  REGION 1..244: note = MSLN scFv domain
QVQLVESGGGLVKPGGSLRLSCAASGFTFSDYYMSWIRQAPGKGLEWVSYISSSGSTIYYADSVKGRFTISRDNAKNSLYLQMNSLRAEDTAVYYCARTSRGLCVLFDYWGQGTLVTVSSGGGGSGGGGSGGGGSGGAIQLTQSPSSLSASVGDRVTITCRASQGISSALAWYQQKPGKAPKLLIYDASSLESGVPSRFSGSGSGTDFTLTISSLQPEDFATYYCQQFNSYPLTFGGGTKVEIK

SEQ ID NO: 197 - protein, 244 aa, synthetic construct
  REGION 1..244: note = MSLN scFv domain
QVQLVESGGGLVKPGGSLRLSCAASGFTFSDYYMSWIRQAPGKGLEWVSYISSSGSTIYYADSVKGRFTISRDNAKNSLYLQMNSLRAEDTAVYYCARSGPSSYWYFDLWGRGTLVTVSSGGGGSGGGGSGGGGSGGAIQLTQSPSSLSASVGDRVTITCRASQGISSALAWYQQKPGKAPKLLIYDASSLESGVPSRFSGSGSGTDFTLTISSLQPEDFATYYCQQFNSYPLTFGGGTKVEIK

SEQ ID NO: 198 - protein, 244 aa, synthetic construct
  REGION 1..244: note = MSLN scFv domain
QVQLVESGGGLVKPGGSLRLSCAASGFTFSDYYMSWIRQAPGKGLEWVSYISSSGSTIYYADSVKGRFTISRDNAKNSLYLQMNSLRAEDTAVYYCARNIYMGGIWFDPWGQGTLVTVSSGGGGSGGGGSGGGGSGGAIQLTQSPSSLSASVGDRVTITCRASQGISSALAWYQQKPGKAPKLLIYDASSLESGVPSRFSGSGSGTDFTLTISSLQPEDFATYYCQQFNSYPLTFGGGTKVEIK

SEQ ID NO: 199 - protein, 243 aa, synthetic construct
  REGION 1..243: note = MSLN scFv domain
QVQLVESGGGLVKPGGSLRLSCAASGFTFSDYYMSWIRQAPGKGLEWVSYISSSGSTIYYADSVKGRFTISRDNAKNSLYLQMNSLRAEDTAVYYCARLTVRTGAFDIWGQGTMVTVSSGGGGSGGGGSGGGGSGGAIQLTQSPSSLSASVGDRVTITCRASQGISSALAWYQQKPGKAPKLLIYDASSLESGVPSRFSGSGSGTDFTLTISSLQPEDFATYYCQQFNSYPLTFGGGTKVEIK

SEQ ID NO: 200 - protein, 243 aa, synthetic construct
  REGION 1..243: note = MSLN scFv domain
QVQLVESGGGLVKPGGSLRLSCAASGFTFSDYYMSWIRQAPGKGLEWVSYISSSGSTIYYADSVKGRFTISRDNAKNSLYLQMNSLRAEDTAVYYCARLRTAHLDFDLWGRGTLVTVSSGGGGSGGGGSGGGGSGGAIQLTQSPSSLSASVGDRVTITCRASQGISSALAWYQQKPGKAPKLLIYDASSLESGVPSRFSGSGSGTDFTLTISSLQPEDFATYYCQQFNSYPLTFGGGTKVEIK

SEQ ID NO: 201 - protein, 243 aa, synthetic construct
  REGION 1..243: note = MSLN scFv domain
QVQLVESGGGLVKPGGSLRLSCAASGFTFSDYYMSWIRQAPGKGLEWVSYISSSGSTIYYADSVKGRFTISRDNAKNSLYLQMNSLRAEDTAVYYCARDLIFPVVFDYWGQGTLVTVSSGGGGSGGGGSGGGGSGGAIQLTQSPSSLSASVGDRVTITCRASQGISSALAWYQQKPGKAPKLLIYDASSLESGVPSRFSGSGSGTDFTLTISSLQPEDFATYYCQQFNSYPLTFGGGTKVEIK

SEQ ID NO: 202 - protein, 246 aa, synthetic construct
  REGION 1..246: note = MSLN scFv domain
QVQLVESGGGLVKPGGSLRLSCAASGFTFSDYYMSWIRQAPGKGLEWVSYISSSGSTIYYADSVKGRFTISRDNAKNSLYLQMNSLRAEDTAVYYCARDGYRKYGYVFFDIWGQGTMVTVSSGGGGSGGGGSGGGGSGGAIQLTQSPSSLSASVGDRVTITCRASQGISSALAWYQQKPGKAPKLLIYDASSLESGVPSRFSGSGSGTDFTLTISSLQPEDFATYYCQQFNSYPLTFGGGTKVEIK

SEQ ID NO: 203 - protein, 246 aa, synthetic construct
  REGION 1..246: note = MSLN scFv domain
QVQLVESGGGLVKPGGSLRLSCAASGFTFSDYYMSWIRQAPGKGLEWVSYISSSGSTIYYADSVKGRFTISRDNAKNSLYLQMNSLRAEDTAVYYCARDGRYRRFWHAFDIWGQGTMVTVSSGGGGSGGGGSGGGGSGGAIQLTQSPSSLSASVGDRVTITCRASQGISSALAWYQQKPGKAPKLLIYDASSLESGVPSRFSGSGSGTDFTLTISSLQPEDFATYYCQQFNSYPLTFGGGTKVEIK

SEQ ID NO: 204 - protein, 242 aa, synthetic construct
  REGION 1..242: note = MSLN scFv domain
QVQLVESGGGLVKPGGSLRLSCAASGFTFSDYYMSWIRQAPGKGLEWVSYISSSGSTIYYADSVKGRFTISRDNAKNSLYLQMNSLRAEDTAVYYCARAHIRGYFDLWGRGTLVTVSSGGGGSGGGGSGGGGSGGAIQLTQSPSSLSASVGDRVTITCRASQGISSALAWYQQKPGKAPKLLIYDASSLESGVPSRFSGSGSGTDFTLTISSLQPEDFATYYCQQFNSYPLTFGGGTKVEIK

SEQ ID NO: 205 - protein, 245 aa, synthetic construct
  REGION 1..245: note = MSLN scFv domain
EVQLLESGGGLVQPGGSLRLSCAASGFTFSSYAMSWVRQAPGKGLEWVSAISGSGGSTYYADSVKGRFTISRDNSKNTLYLQMNSLRAEDTAVYYCATWMGGGGRWYFDLWGRGTLVTVSSGGGGSGGGGSGGGGSGGAIQLTQSPSSLSASVGDRVTITCRASQGISSALAWYQQKPGKAPKLLIYDASSLESGVPSRFSGSGSGTDFTLTISSLQPEDFATYYCQQFNNYPLTFGGGTKVEIK

SEQ ID NO: 206 - protein, 243 aa, synthetic construct
  REGION 1..243: note = MSLN scFv domain
EVQLLESGGGLVQPGGSLRLSCAASGFTFSSYAMSWVRQAPGKGLEWVSAISGSGGSTYYADSVKGRFTISRDNSKNTLYLQMNSLRAEDTAVYYCARTSRTTWYFDLWGRGTLVTVSSGGGGSGGGGSGGGGSGGAIQLTQSPSSLSASVGDRVTITCRASQGISSALAWYQQKPGKAPKLLIYDASSLESGVPSRFSGSGSGTDFTLTISSLQPEDFATYYCQQFNNYPLTFGGGTKVEIK

SEQ ID NO: 207 - protein, 245 aa, synthetic construct
  REGION 1..245: note = MSLN scFv domain
EVQLLESGGGLVQPGGSLRLSCAASGFTFSSYAMSWVRQAPGKGLEWVSAISGSGGSTYYADSVKGRFTISRDNSKNTLYLQMNSLRAEDTAVYYCAKWMGGGGRLYFDLWGRGTLVTVSSGGGGSGGGGSGGGGSGGAIQLTQSPSSLSASVGDRVTITCRASQGISSALAWYQQKPGKAPKLLIYDASSLESGVPSRFSGSGSGTDFTLTISSLQPEDFATYYCQQFNNYPLTFGGGTKVEIK

SEQ ID NO: 208 - protein, 244 aa, synthetic construct
  REGION 1..244: note = MSLN scFv domain
EVQLLESGGGLVQPGGSLRLSCAASGFTFSSYAMSWVRQAPGKGLEWVSAISGSGGSTYYADSVKGRFTISRDNSKNTLYLQMNSLRAEDTAVYYCAKWGGRLYWYFDLWGRGTLVTVSSGGGGSGGGGSGGGGSGGAIQLTQSPSSLSASVGDRVTITCRASQGISSALAWYQQKPGKAPKLLIYDASSLESGVPSRFSGSGSGTDFTLTISSLQPEDFATYYCQQFNNYPLTFGGGTKVEIK

SEQ ID NO: 209 - protein, 243 aa, synthetic construct
  REGION 1..243: note = MSLN scFv domain
EVQLLESGGGLVQPGGSLRLSCAASGFTFSSYAMSWVRQAPGKGLEWVSAISGSGGSTYYADSVKGRFTISRDNSKNTLYLQMNSLRAEDTAVYYCAKVIRQLWYFDLWGRGTLVTVSSGGGGSGGGGSGGGGSGGAIQLTQSPSSLSASVGDRVTITCRASQGISSALAWYQQKPGKAPKLLIYDASSLESGVPSRFSGSGSGTDFTLTISSLQPEDFATYYCQQFNNYPLTFGGGTKVEIK

SEQ ID NO: 210 - protein, 243 aa, synthetic construct
  REGION 1..243: note = MSLN scFv domain
EVQLLESGGGLVQPGGSLRLSCAASGFTFSSYAMSWVRQAPGKGLEWVSAISGSGGSTYYADSVKGRFTISRDNSKNTLYLQMNSLRAEDTAVYYCAKVFANSWYFDLWGRGTLVTVSSGGGGSGGGGSGGGGSGGAIQLTQSPSSLSASVGDRVTITCRASQGISSALAWYQQKPGKAPKLLIYDASSLESGVPSRFSGSGSGTDFTLTISSLQPEDFATYYCQQFNNYPLTFGGGTKVEIK

SEQ ID NO: 211 - protein, 243 aa, synthetic construct
  REGION 1..243: note = MSLN scFv domain
EVQLLESGGGLVQPGGSLRLSCAASGFTFSSYAMSWVRQAPGKGLEWVSAISGSGGSTYYADSVKGRFTISRDNSKNTLYLQMNSLRAEDTAVYYCAKVDRTTWYFDLWGRGTLVTVSSGGGGSGGGGSGGGGSGGAIQLTQSPSSLSASVGDRVTITCRASQGISSALAWYQQKPGKAPKLLIYDASSLESGVPSRFSGSGSGTDFTLTISSLQPEDFATYYCQQFNNYPLTFGGGTKVEIK

SEQ ID NO: 212 - protein, 246 aa, synthetic construct
  REGION 1..246: note = MSLN scFv domain
EVQLLESGGGLVQPGGSLRLSCAASGFTFSSYAMSWVRQAPGKGLEWVSAISGSGGSTYYADSVKGRFTISRDNSKNTLYLQMNSLRAEDTAVYYCAKRWGKDGPYWYFDLWGRGTLVTVSSGGGGSGGGGSGGGGSGGAIQLTQSPSSLSASVGDRVTITCRASQGISSALAWYQQKPGKAPKLLIYDASSLESGVPSRFSGSGSGTDFTLTISSLQPEDFATYYCQQFNNYPLTFGGGTKVEIK

SEQ ID NO: 213 - protein, 246 aa, synthetic construct
  REGION 1..246: note = MSLN scFv domain
EVQLLESGGGLVQPGGSLRLSCAASGFTFSSYAMSWVRQAPGKGLEWVSAISGSGGSTYYADSVKGRFTISRDNSKNTLYLQMNSLRAEDTAVYYCAKRRDSYGPYWYFDLWGRGTLVTVSSGGGGSGGGGSGGGGSGGAIQLTQSPSSLSASVGDRVTITCRASQGISSALAWYQQKPGKAPKLLIYDASSLESGVPSRFSGSGSGTDFTLTISSLQPEDFATYYCQQFNNYPLTFGGGTKVEIK

SEQ ID NO: 214 - protein, 245 aa, synthetic construct
  REGION 1..245: note = MSLN scFv domain
EVQLLESGGGLVQPGGSLRLSCAASGFTFSSYAMSWVRQAPGKGLEWVSAISGSGGSTYYADSVKGRFTISRDNSKNTLYLQMNSLRAEDTAVYYCAKNRPPPGYWYFDLWGRGTLVTVSSGGGGSGGGGSGGGGSGGAIQLTQSPSSLSASVGDRVTITCRASQGISSALAWYQQKPGKAPKLLIYDASSLESGVPSRFSGSGSGTDFTLTISSLQPEDFATYYCQQFNNYPLTFGGGTKVEIK

SEQ ID NO: 215 - protein, 243 aa, synthetic construct
  REGION 1..243: note = MSLN scFv domain
EVQLLESGGGLVQPGGSLRLSCAASGFTFSSYAMSWVRQAPGKGLEWVSAISGSGGSTYYADSVKGRFTISRDNSKNTLYLQMNSLRAEDTAVYYCAKGRRFSWYFDLWGRGTLVTVSSGGGGSGGGGSGGGGSGGAIQLTQSPSSLSASVGDRVTITCRASQGISSALAWYQQKPGKAPKLLIYDASSLESGVPSRFSGSGSGTDFTLTISSLQPEDFATYYCQQFNNYPLTFGGGTKVEIK

SEQ ID NO: 216 - protein, 121 aa, synthetic construct
  REGION 1..121: note = heavy chain variable fragment
EVQLVESGGGLVKPGGSLRLSCAASGFTFSNAWMSWVRQAPGKGLEWVGRIKSKTDGGTTDYAAPVKGRFTISRDDSKNTLYLQMNSLKTEDTAVYYCTTDLPKLRNFHIWGQGTLVTVSS

SEQ ID NO: 217 - protein, 124 aa, synthetic construct
  REGION 1..124: note = heavy chain variable fragment
EVQLVESGGGLVQPGGSLRLSCAASGFTFSSYAMHWVRQAPGKGLEYVSAISSNGGSTYYANSVKGRFTISRDNSKNTLYLQMGSLRAEDMAVYYCASLEYHGFRQYGLRYWHWGQGTLVTVSS

SEQ ID NO: 218 - protein, 123 aa, synthetic construct
  REGION 1..123: note = heavy chain variable fragment
QLQLQESGSGLVKPSQTLSLTCAVSGGSISSGGYSWSWIRQPPGKGLEWIGYIYHSGSTYYNPSLKSRVTISVDRSKNQFSLKLSSVTAADTAVYYCASIKFWFAGINYFFPWGQGTLVTVSS

SEQ ID NO: 219 - protein, 119 aa, synthetic construct
  REGION 1..119: note = heavy chain variable fragment
EVQLVESGGGLVQPGGSLRLSCAASGFTFSSYWMHWVRQAPGKGLVWVSRINSDGSSTSYADSVKGRFTISRDNAKNTLYLQMNSLRAEDTAVYYCASGFLGMGSNFIWGQGTLVTVSS

SEQ ID NO: 220 - protein, 119 aa, synthetic construct
  REGION 1..119: note = heavy chain variable fragment
QVQLQESGPGLVKPSQTLSLTCTVSGGSISSGGYYWSWIRQHPGKGLEWIGYIYYSGSTYYNPSLKSLVTISVDTSKNQFSLKLSSVTAADTAVYYCASGDRARYFDLWGRGTLVTVSS

SEQ ID NO: 221 - protein, 123 aa, synthetic construct
  REGION 1..123: note = heavy chain variable fragment
EVQLVESGGGLVQPGGSLRLSCAASGFTFSSYWMHWVRQAPGKGLVWVSRINSDGSSTSYADSVKGRFTISRDNAKNTLYLQMNSLRAEDTAVYYCARYPRGYHQMVDAFDIWGQGTMVTVSS

SEQ ID NO: 222 - protein, 126 aa, synthetic construct
  REGION 1..126: note = heavy chain variable fragment
QLQLQESGPGLVKPSETLSLTCTVSGGSISSSSYYWGWIRQPPGKGLEWIGSIYYSGSTYYNPSLKSRVTISVDTSKNQFSLKLSSVTAADTAVYYCARVRFLAARTTIPEANFLWGQGTLVTVSS

SEQ ID NO: 223 - protein, 118 aa, synthetic construct
  REGION 1..118: note = heavy chain variable fragment
EVQLVESGGGLVQPGGSLRLSCAASGFTFSSYSMNWVRQAPGKGLEWVSYISSSSSTIYYADSVKGRFTISRDNAKNSLYLQMNSLRAEDTAVYYCARVLSRARFDYWGQGTLVTVSS

SEQ ID NO: 224 - protein, 117 aa, synthetic construct
  REGION 1..117: note = heavy chain variable fragment
EVQLVESGGGLVKPGGSLRLSCAASGFTFSSYSMNWVRQAPGKGLEWVSSISSSSSYIYYADSVKGRFTISRDNAKNSLYLQMNSLRAEDTAVYYCARLRGRVFDPWGQGTLVTVSS

SEQ ID NO: 225 - protein, 123 aa, synthetic construct
  REGION 1..123: note = heavy chain variable fragment
QLQLQESGPGLVKPSETLSLTCTVSGGSISSSSYYWGWIRQPPGKGLEWIGSIYYSGSTYYNPSLKSRVTISVDTSKNQFSLKLSSVTAADTAVYYCARIKFTSFLYVHGFLWGQGTLVTVSS

SEQ ID NO: 226 - protein, 122 aa, synthetic construct
  REGION 1..122: note = heavy chain variable fragment
QVQLVQSGAEVKKPGASVKVSCKASGYTFTSYAMHWVRQAPGQRLEWMGWINAGNGNTKYSQKFQGRVTITRDTSASTAYMELSSLRSEDTAVYYCARGQRWLYLGGIRRHWGQGTLVTVSS

SEQ ID NO: 227 - protein, 120 aa, synthetic construct
  REGION 1..120: note = heavy chain variable fragment
QVQLQESGPGLVKPSETLSLTCTVSGGSISSYYWSWIRQPPGKGLEWIGYIYYSGSTNYNPSLKSRVTISVDTSKNQFSLKLSSVTAADTAVYYCAREWIPSRPYYFDYWGQGTLVTVSS

SEQ ID NO: 228 - protein, 120 aa, synthetic construct
  REGION 1..120: note = heavy chain variable fragment
QVQLQESGPGLVKPSQTLSLTCTVSGGSISSGGYYWSWIRQPPGKGLEWIGYIYYSGSTYYNPSLKSRVTISVDTSKNQFSLKLSSVTAADTAVYYCARESTGTGAFDIWGQGTMVTVSS

SEQ ID NO: 229 - protein, 122 aa, synthetic construct
  REGION 1..122: note = heavy chain variable fragment
EVQLVESGGGVVRPGGSLRLSCAASGFTFDDYGMSWVRQAPGKGLEWVSGINWNGGSTGYADSVKGRFTISRDNAKNSLYLQMNSLRAEDTALYHCARERYRRVLHWYFDLWGRGTLVTVSS

SEQ ID NO: 230 - protein, 116 aa, synthetic construct
  REGION 1..116: note = heavy chain variable fragment
QVQLVQSGAEVKKPGASVKVSCKASGYTFTSYDINWVRQATGQGLEWMGWMNPNSGNTGYAQKFQGRVTMTRNTSISTAYMELSSLRSEDTAVYYCAREPDAFDIWGQGTMVTVSS

SEQ ID NO: 231 - protein, 122 aa, synthetic construct
  REGION 1..122: note = heavy chain variable fragment
QVQLQESGPGLVKPSQTLSLTCTVSGGSISSGGYYWSWIRQPPGKGLEWIGYIYYSGSTYYNPSLKSRVTISVDTSKNQFSLKLSSVTAADTAVYYCAREHMGTIPYYFDYWGQGTLVTVSS

SEQ ID NO: 232 - protein, 120 aa, synthetic construct
  REGION 1..120: note = heavy chain variable fragment
QVQLQESGPGLVKPSQTLSLTCTVSGGSISSGGYYWSWIRQPPGKGLEWIGYIYYSGSTYYNPSLKSRVTISVDTSKNQFSLKLSSVTAADTAVYYCAREEFGYGDVLYWGQGTLVTVSS

SEQ ID NO: 233 - protein, 120 aa, synthetic construct
  REGION 1..120: note = heavy chain variable fragment
QVQLQESGPGLVKPSQTLSLTCTVSGGSISSGDYYWSWIRQPPGKGLEWIGYIYYSGSTYYNPSLKSRVTISVDTSKNQFSLKLSSVTAADTAVYYCAREDVVKGAFDIWGQGTMVTVSS

SEQ ID NO: 234 - protein, 121 aa, synthetic construct
  REGION 1..121: note = heavy chain variable fragment
EVQLVESGGGLVQPGGSLRLSCAASGFTFSSYSMNWVRQAPGKGLEWVSYISSSSSTIYYADSVKGRFTISRDNAKNSLYLQMNSLRAEDTAVYYCAREDFSHKLGYFQHWGQGTLVTVSS

SEQ ID NO: 235 - protein, 114 aa, synthetic construct
  REGION 1..114: note = heavy chain variable fragment
QVQLVESGGGLVKPGGSLRLSCAASGFTFSDYYMSWIRQAPGKGLEWVSYISSSGSTIYYADSVKGRFTISRDNAKNSLYLQMNSLRAEDTAVYYCARDYDYVWGQGTLVTVSS

SEQ ID NO: 236 - protein, 120 aa, synthetic construct
  REGION 1..120: note = heavy chain variable fragment
QVQLQESGPGLVKPSQTLSLTCTVSGGSISSGDYYWSWIRQPPGKGLEWIGYIYYSGSTYYNPSLKSRVTISVDTSKNQFSLKLSSVTAADTAVYYCARDRRDWDWFDPWGQGTLVTVSS

SEQ ID NO: 237 - protein, 119 aa, synthetic construct
  REGION 1..119: note = heavy chain variable fragment
QVQLQESGPGLVKPSGTLSLTCAVSGGSISSSNWWSWVRQPPGKGLEWIGEIYHSGSTNYNPSLKSRVTISVDKSKNQFSLKLSSVTAADTAVYYCARDQQALKYRVDWGQGTLVTVSS

SEQ ID NO: 238 - protein, 118 aa, synthetic construct
  REGION 1..118: note = heavy chain variable fragment
QVQLVQSGAEVKKPGASVKVSCKASGYTFTSYGISWVRQAPGQGLEWMGWISAYNGNTNYAQKLQGRVTMTTDTSTSTAYMELRSLRSDDTAVYYCARDLTLGCFDYWGQGTLVTVSS

SEQ ID NO: 239 - protein, 118 aa, synthetic construct
  REGION 1..118: note = heavy chain variable fragment
EVQLVESGGGLVQPGGSLRLSCAASGFTVSSNYMSWVRQAPGKGLEWVSVIYSGGSTYYADSVKGRFTISRDNSKNTLYLQMNSLRAEDTAVYYCARDGSNSWYFDLWGRGTLVTVSS

SEQ ID NO: 240 - protein, 118 aa, synthetic construct
  REGION 1..118: note = heavy chain variable fragment
QVQLVESGGGVVQPGRSLRLSCAASGFTFSSYGMHWVRQAPGKGLEWVAVIWYDGSNKYYADSVKGRFTISRDNSKNTLYLQMNSLRAEDTAVYYCARAFLFLSFSVWGQGTLVTVSS

SEQ ID NO: 241 - protein, 121 aa, synthetic construct
  REGION 1..121: note = heavy chain variable fragment
EVQLVESGGVVVQPGGSLRLSCAASGFTFDDYTMHWVRQAPGKGLEWVSLISWDGGSTYYADSVKGRFTISRDNSKNSLYLQMNSLRTEDTALYYCAKGIFYSSKEDFDYWGQGTLVTVSS

SEQ ID NO: 242 - protein, 124 aa, synthetic construct
  REGION 1..124: note = heavy chain variable fragment
EVQLVESGGVVVQPGGSLRLSCAASGFTFDDYTMHWVRQAPGKGLEWVSLISWDGGSTYYADSVKGRFTISRDNSKNSLYLQMNSLRTEDTALYYCAKDIWIFYSSNPKPTVYWGQGTLVTVSS

SEQ ID NO: 243 - protein, 122 aa, synthetic construct
  REGION 1..122: note = heavy chain variable fragment
QVQLVQSGSELKKPGASVKVSCKASGYTFTSYAMNWVRQAPGQGLEWMGWINTNTGNPTYAQGFTGRFVFSFDTSVSTAYLQICSLKAEDTAVYYCARKDQTLTYGNWFDPWGQGTLVTVSS

SEQ ID NO: 244 - protein, 118 aa, synthetic construct
  REGION 1..118: note = heavy chain variable fragment
QVQLQESGPGLVKPSETLSLTCTVSGGSVSSGSYYWSWIRQPPGKGLEWIGYIYYSGSTNYNPSLKSRVTISVDTSKNQFSLKLSSVTAADTAVYYCARDHYERGLYWGQGTLVTVSS

SEQ ID NO: 245 - protein, 118 aa, synthetic construct
  REGION 1..118: note = heavy chain variable fragment
QVQLVESGGGLVKPGGSLRLSCAASGFTFSDYYMSWIRQAPGKGLEWVSYISSSGSTIYYADSVKGRFTISRDNAKNSLYLQMNSLRAEDTAVYYCARYMYNWYFDLWGRGTLVTVSS

SEQ ID NO: 246 - protein, 117 aa, synthetic construct
  REGION 1..117: note = heavy chain variable fragment
QVQLVESGGGLVKPGGSLRLSCAASGFTFSDYYMSWIRQAPGKGLEWVSYISSSGSTIYYADSVKGRFTISRDNAKNSLYLQMNSLRAEDTAVYYCARDRRPAFDIWGQGTMVTVSS

SEQ ID NO: 247 - protein, 119 aa, synthetic construct
  REGION 1..119: note = heavy chain variable fragment
QVQLVESGGGLVKPGGSLRLSCAASGFTFSDYYMSWIRQAPGKGLEWVSYISSSGSTIYYADSVKGRFTISRDNAKNSLYLQMNSLRAEDTAVYYCAVHLKRRPYFDYWGQGTLVTVSS

SEQ ID NO: 248 - protein, 118 aa, synthetic construct
  REGION 1..118: note = heavy chain variable fragment
QVQLVESGGGLVKPGGSLRLSCAASGFTFSDYYMSWIRQAPGKGLEWVSYISSSGSTIYYADSVKGRFTISRDNAKNSLYLQMNSLRAEDTAVYYCASVHKKPIFDYWGQGTLVTVSS

SEQ ID NO: 249 - protein, 118 aa, synthetic construct
  REGION 1..118: note = heavy chain variable fragment
QVQLVESGGGLVKPGGSLRLSCAASGFTFSDYYMSWIRQAPGKGLEWVSYISSSGSTIYYADSVKGRFTISRDNAKNSLYLQMNSLRAEDTAVYYCASTSRRCTFQHWGQGTLVTVSS

SEQ ID NO: 250 - protein, 118 aa, synthetic construct
  REGION 1..118: note = heavy chain variable fragment
QVQLVESGGGLVKPGGSLRLSCAASGFTFSDYYMSWIRQAPGKGLEWVSYISSSGSTIYYADSVKGRFTISRDNAKNSLYLQMNSLRAEDTAVYYCASTSPRPLFQHWGQGTLVTVSS

SEQ ID NO: 251 - protein, 120 aa, synthetic construct
  REGION 1..120: note = heavy chain variable fragment
QVQLVESGGGLVKPGGSLRLSCAASGFTFSDYYMSWIRQAPGKGLEWVSYISSSGSTIYYADSVKGRFTISRDNAKNSLYLQMNSLRAEDTAVYYCASPYQVRGVYFDYWGQGTLVTVSS

SEQ ID NO: 252 - protein, 120 aa, synthetic construct
  REGION 1..120: note = heavy chain variable fragment
QVQLVESGGGLVKPGGSLRLSCAASGFTFSDYYMSWIRQAPGKGLEWVSYISSSGSTIYYADSVKGRFTISRDNAKNSLYLQMNSLRAEDTAVYYCASPYKKRRTVFDYWGQGTLVTVSS

SEQ ID NO: 253 - protein, 119 aa, synthetic construct
  REGION 1..119: note = heavy chain variable fragment
QVQLVESGGGLVKPGGSLRLSCAASGFTFSDYYMSWIRQAPGKGLEWVSYISSSGSTIYYADSVKGRFTISRDNAKNSLYLQMNSLRAEDTAVYYCASLQRGLALFQHWGQGTLVTVSS

SEQ ID NO: 254 - protein, 118 aa, synthetic construct
  REGION 1..118: note = heavy chain variable fragment
QVQLVESGGGLVKPGGSLRLSCAASGFTFSDYYMSWIRQAPGKGLEWVSYISSSGSTIYYADSVKGRFTISRDNAKNSLYLQMNSLRAEDTAVYYCASILSVPYFDLWGRGTLVTVSS

SEQ ID NO: 255 - protein, 123 aa, synthetic construct
  REGION 1..123: note = heavy chain variable fragment
QVQLVESGGGLVKPGGSLRLSCAASGFTFSDYYMSWIRQAPGKGLEWVSYISSSGSTIYYADSVKGRFTISRDNAKNSLYLQMNSLRAEDTAVYYCASGWIRVPLRLPLFQHWGQGTLVTVSS

SEQ ID NO: 256 - protein, 118 aa, synthetic construct
  REGION 1..118: note = heavy chain variable fragment
QVQLVESGGGLVKPGGSLRLSCAASGFTFSDYYMSWIRQAPGKGLEWVSYISSSGSTIYYADSVKGRFTISRDNAKNSLYLQMNSLRAEDTAVYYCARVTIFAIFDIWGQGTMVTVSS

SEQ ID NO: 257 - protein, 119 aa, synthetic construct
  REGION 1..119: note = heavy chain variable fragment
QVQLVESGGGLVKPGGSLRLSCAASGFTFSDYYMSWIRQAPGKGLEWVSYISSSGSTIYYADSVKGRFTISRDNAKNSLYLQMNSLRAEDTAVYYCARVGRGFVHFDLWGRGTLVTVSS

SEQ ID NO: 258 - DNA, 1503 bp, synthetic construct
  misc_feature 1..1503: note = PA2.1.14 scFv LIR1 HTICD
  source 1..1503: mol_type = other DNA
caggtgcagctggtgcagtctggggctgaggtgaagaagcctgggtcctcagtgaaggtttcctgcaaggcttctggatacaccttcactagctatcatatacattgggtgcgccaggcccccggacaagggcttgagtggatcggatggatctaccctggcaatgttaacacagaatataatgagaagttcaagggcaaagccaccattaccgcggacgaatccacgaacacagcctacatggagctgagcagcctgagatctgaagacacggctgtgtattactgtgcgagggaggaaattacctacgctatggactactggggccagggaaccctggtcaccgtgtcctcaggcggaggtggaagcggagggggaggatctggcggcggaggaagcggaggcgacattcaaatgacccagagcccatccaccctgagcgcatctgtaggtgaccgggtcaccatcacttgtagatccagtcagagtattgtacacagtaatgggaacacctatttggaatggtatcagcagaaaccaggtaaagccccaaaattgctcatctacaaagtctctaacagatttagtggtgtaccagccaggttcagcggttccggaagtggtactgaattcaccctcacgatctcctctctccagccagatgatttcgccacttattactgttttcaaggttcacatgtgccgcgcacattcggtcagggtactaaagtagaagtcaaatacggctcacagagctccaaaccctacctgctgactcaccccagtgaccccctggagctcgtggtctcaggaccgtctgggggccccagctccccgacaacaggccccacctccacatctggccctgaggaccagcccctcacccccaccgggtcggatccccagagtggtctgggaaggcacctgggggttgtgatcggcatcttggtggccgtcatcctactgctcctcctcctcctcctcctcttcctcatcctccgacatcgacgtcagggcaaacactggacatcgacccagagaaaggctgatttccaacatcctgcaggggctgtggggccagagcccacagacagaggcctgcagtggaggtccagcccagctgccgatgcccaggaagaaaacctctatgctgccgtgaagcacacacagcctgaggatggggtggagatggacactcggagcccacacgatgaagacccccaggcagtgacgtatgccgaggtgaaacactccagacctaggagagaaatggcctctcctccttccccactgtctggggaattcctggacacaaaggacagacaggcggaagaggacaggcagatggacactgaggctgctgcatctgaagccccccaggatgtgacctacgcccagctgcacagcttgaccctcagacgggaggcaactgagcctcctccatcccaggaagggccctctccagctgtgcccagcatctacgccactctggccatccactag

SEQ ID NO: 259 - protein, 120 aa, synthetic construct
  REGION 1..120: note = heavy chain variable fragment
QVQLVESGGGLVKPGGSLRLSCAASGFTFSDYYMSWIRQAPGKGLEWVSYISSSGSTIYYADSVKGRFTISRDNAKNSLYLQMNSLRAEDTAVYYCARTSRGLCVLFDYWGQGTLVTVSS

SEQ ID NO: 260 - protein, 120 aa, synthetic construct
  REGION 1..120: note = heavy chain variable fragment
QVQLVESGGGLVKPGGSLRLSCAASGFTFSDYYMSWIRQAPGKGLEWVSYISSSGSTIYYADSVKGRFTISRDNAKNSLYLQMNSLRAEDTAVYYCARSGPSSYWYFDLWGRGTLVTVSS

SEQ ID NO: 261 - protein, 120 aa, synthetic construct
  REGION 1..120: note = heavy chain variable fragment
QVQLVESGGGLVKPGGSLRLSCAASGFTFSDYYMSWIRQAPGKGLEWVSYISSSGSTIYYADSVKGRFTISRDNAKNSLYLQMNSLRAEDTAVYYCARNIYMGGIWFDPWGQGTLVTVSS

SEQ ID NO: 262 - protein, 119 aa, synthetic construct
  REGION 1..119: note = heavy chain variable fragment
QVQLVESGGGLVKPGGSLRLSCAASGFTFSDYYMSWIRQAPGKGLEWVSYISSSGSTIYYADSVKGRFTISRDNAKNSLYLQMNSLRAEDTAVYYCARLTVRTGAFDIWGQGTMVTVSS

SEQ ID NO: 263 - protein, 119 aa, synthetic construct
  REGION 1..119: note = heavy chain variable fragment
QVQLVESGGGLVKPGGSLRLSCAASGFTFSDYYMSWIRQAPGKGLEWVSYISSSGSTIYYADSVKGRFTISRDNAKNSLYLQMNSLRAEDTAVYYCARLRTAHLDFDLWGRGTLVTVSS

SEQ ID NO: 264 - protein, 119 aa, synthetic construct
  REGION 1..119: note = heavy chain variable fragment
QVQLVESGGGLVKPGGSLRLSCAASGFTFSDYYMSWIRQAPGKGLEWVSYISSSGSTIYYADSVKGRFTISRDNAKNSLYLQMNSLRAEDTAVYYCARDLIFPVVFDYWGQGTLVTVSS

SEQ ID NO: 265 - protein, 122 aa, synthetic construct
  REGION 1..122: note = heavy chain variable fragment
QVQLVESGGGLVKPGGSLRLSCAASGFTFSDYYMSWIRQAPGKGLEWVSYISSSGSTIYYADSVKGRFTISRDNAKNSLYLQMNSLRAEDTAVYYCARDGYRKYGYVFFDIWGQGTMVTVSS

SEQ ID NO: 266 - protein, 122 aa, synthetic construct
  REGION 1..122: note = heavy chain variable fragment
QVQLVESGGGLVKPGGSLRLSCAASGFTFSDYYMSWIRQAPGKGLEWVSYISSSGSTIYYADSVKGRFTISRDNAKNSLYLQMNSLRAEDTAVYYCARDGRYRRFWHAFDIWGQGTMVTVSS

SEQ ID NO: 267 - protein, 118 aa, synthetic construct
  REGION 1..118: note = heavy chain variable fragment
QVQLVESGGGLVKPGGSLRLSCAASGFTFSDYYMSWIRQAPGKGLEWVSYISSSGSTIYYADSVKGRFTISRDNAKNSLYLQMNSLRAEDTAVYYCARAHIRGYFDLWGRGTLVTVSS

SEQ ID NO: 268 - protein, 121 aa, synthetic construct
  REGION 1..121: note = heavy chain variable fragment
EVQLLESGGGLVQPGGSLRLSCAASGFTFSSYAMSWVRQAPGKGLEWVSAISGSGGSTYYADSVKGRFTISRDNSKNTLYLQMNSLRAEDTAVYYCATWMGGGGRWYFDLWGRGTLVTVSS

SEQ ID NO: 269 - protein, 119 aa, synthetic construct
  REGION 1..119: note = heavy chain variable fragment
EVQLLESGGGLVQPGGSLRLSCAASGFTFSSYAMSWVRQAPGKGLEWVSAISGSGGSTYYADSVKGRFTISRDNSKNTLYLQMNSLRAEDTAVYYCARTSRTTWYFDLWGRGTLVTVSS

SEQ ID NO: 270 - protein, 121 aa, synthetic construct
  REGION 1..121: note = heavy chain variable fragment
EVQLLESGGGLVQPGGSLRLSCAASGFTFSSYAMSWVRQAPGKGLEWVSAISGSGGSTYYADSVKGRFTISRDNSKNTLYLQMNSLRAEDTAVYYCAKWMGGGGRLYFDLWGRGTLVTVSS

SEQ ID NO: 271 - protein, 120 aa, synthetic construct
  REGION 1..120: note = heavy chain variable fragment
EVQLLESGGGLVQPGGSLRLSCAASGFTFSSYAMSWVRQAPGKGLEWVSAISGSGGSTYYADSVKGRFTISRDNSKNTLYLQMNSLRAEDTAVYYCAKWGGRLYWYFDLWGRGTLVTVSS

SEQ ID NO: 272 - protein, 119 aa, synthetic construct
  REGION 1..119: note = heavy chain variable fragment
EVQLLESGGGLVQPGGSLRLSCAASGFTFSSYAMSWVRQAPGKGLEWVSAISGSGGSTYYADSVKGRFTISRDNSKNTLYLQMNSLRAEDTAVYYCAKVIRQLWYFDLWGRGTLVTVSS

SEQ ID NO: 273 - protein, 119 aa, synthetic construct
  REGION 1..119: note = heavy chain variable fragment
EVQLLESGGGLVQPGGSLRLSCAASGFTFSSYAMSWVRQAPGKGLEWVSAISGSGGSTYYADSVKGRFTISRDNSKNTLYLQMNSLRAEDTAVYYCAKVFANSWYFDLWGRGTLVTVSS

SEQ ID NO: 274 - protein, 119 aa, synthetic construct
  REGION 1..119: note = heavy chain variable fragment
EVQLLESGGGLVQPGGSLRLSCAASGFTFSSYAMSWVRQAPGKGLEWVSAISGSGGSTYYADSVKGRFTISRDNSKNTLYLQMNSLRAEDTAVYYCAKVDRTTWYFDLWGRGTLVTVSS

SEQ ID NO: 275 - protein, 122 aa, synthetic construct
  REGION 1..122: note = heavy chain variable fragment
EVQLLESGGGLVQPGGSLRLSCAASGFTFSSYAMSWVRQAPGKGLEWVSAISGSGGSTYYADSVKGRFTISRDNSKNTLYLQMNSLRAEDTAVYYCAKRWGKDGPYWYFDLWGRGTLVTVSS

SEQ ID NO: 276 - protein, 122 aa, synthetic construct
  REGION 1..122: note = heavy chain variable fragment
EVQLLESGGGLVQPGGSLRLSCAASGFTFSSYAMSWVRQAPGKGLEWVSAISGSGGSTYYADSVKGRFTISRDNSKNTLYLQMNSLRAEDTAVYYCAKRRDSYGPYWYFDLWGRGTLVTVSS

SEQ ID NO: 277 - protein, 121 aa, synthetic construct
  REGION 1..121: note = heavy chain variable fragment
EVQLLESGGGLVQPGGSLRLSCAASGFTFSSYAMSWVRQAPGKGLEWVSAISGSGGSTYYADSVKGRFTISRDNSKNTLYLQMNSLRAEDTAVYYCAKNRPPPGYWYFDLWGRGTLVTVSS

SEQ ID NO: 278 - protein, 119 aa, synthetic construct
  REGION 1..119: note = heavy chain variable fragment
EVQLLESGGGLVQPGGSLRLSCAASGFTFSSYAMSWVRQAPGKGLEWVSAISGSGGSTYYADSVKGRFTISRDNSKNTLYLQMNSLRAEDTAVYYCAKGRRFSWYFDLWGRGTLVTVSS

SEQ ID NO: 279 - protein, 107 aa, synthetic construct [sequence omitted]

SEQ ID NO: 280 - protein, 107 aa, synthetic construct
  REGION 1..107: note = light chain variable fragment
DIQMTQSPSSVSASVGDRVTITCRASQGISSWLAWYQQKPGKAPKLLIYAASSLQSGVPSRFSGSGSGTDFTLTISSLQPEDFATYYCQQANSFPLTFGGGTKVEIK

SEQ ID NO: 281 - protein, 107 aa, synthetic construct [sequence omitted]

SEQ ID NO: 282 - protein, 107 aa, synthetic construct
  REGION 1..107: note = light chain variable fragment
AIQLTQSPSSLSASVGDRVTITCRASQGISSALAWYQQKPGKAPKLLIYDASSLESGVPSRFSGSGSGTDFTLTISSLQPEDFATYYCQQFNNYPLTFGGGTKVEIK

SEQ ID NO: 283 - protein, 42 aa, unidentified
  REGION 1..42: note = 4-1BB co-stimulatory domain
KRGRKKLLYIFKQPFMRPVQTTQEEDGCSCRFPEEEEGGCEL

SEQ ID NO: 284 - DNA, 126 bp, unidentified
  misc_feature 1..126: note = encodes 4-1BB co-stimulatory domain
  source 1..126: mol_type = unassigned DNA
aaacggggcagaaagaaactcctgtatatattcaaacaaccatttatgaggccagtacaaactactcaagaggaagatggctgtagctgccgatttccagaagaagaagaaggaggatgtgaactg

SEQ ID NO: 285 - protein, 195 aa, synthetic construct
  REGION 1..195: note = CAR intracellular domain
RSKRSRLLHSDYMNMTPRRPGPTRKHYQPYAPPRDFAAYRSKRGRKKLLYIFKQPFMRPVQTTQEEDGCSCRFPEEEEGGCELRVKFSRSADAPAYKQGQNQLYNELNLGRREEYDVLDKRRGRDPEMGGKPRRKNPQEGLYNELQKDKMAEAYSEIGMKGERRRGKGHDGLYQGLSTATKDTYDALHMQALPPR

SEQ ID NO: 286 - protein, 512 aa, synthetic construct
  REGION 1..512: note = single chain variable fragment
EVQLVESGGGLVKPGGSLRLSCAASGFTFSNAWMSWVRQAPGKGLEWVGRIKSKTDGGTTDYAAPVKGRFTISRDDSKNTLYLQMNSLKTEDTAVYYCTTDLPKLRNFHIWGQGTLVTVSSGGGGSGGGGSGGGGSGGDIQMTQSPSSLSASVGDRVTITCRASQSISSYLNWYQQKPGKAPKLLIYAASSLQSGVPSRFSGSGSGTDFTLTISSLQPEDFATYYCQQSYSTPLTFGGGTKVEIKTTTPAPRPPTPAPTIASQPLSLRPEACRPAAGGAVHTRGLDFACDFWVLVVVGGVLACYSLLVTVAFIIFWVRSKRSRLLHSDYMNMTPRRPGPTRKHYQPYAPPRDFAAYRSKRGRKKLLYIFKQPFMRPVQTTQEEDGCSCRFPEEEEGGCELRVKFSRSADAPAYKQGQNQLYNELNLGRREEYDVLDKRRGRDPEMGGKPRRKNPQEGLYNELQKDKMAEAYSEIGMKGERRRGKGHDGLYQGLSTATKDTYDALHMQALPPR

SEQ ID NO: 287 - protein, 515 aa, synthetic construct
  REGION 1..515: note = single chain variable fragment
EVQLVESGGGLVQPGGSLRLSCAASGFTFSSYAMHWVRQAPGKGLEYVSAISSNGGSTYYANSVKGRFTISRDNSKNTLYLQMGSLRAEDMAVYYCASLEYHGFRQYGLRYWHWGQGTLVTVSSGGGGSGGGGSGGGGSGGDIQMTQSPSSLSASVGDRVTITCRASQSISSYLNWYQQKPGKAPKLLIYAASSLQSGVPSRFSGSGSGTDFTLTISSLQPEDFATYYCQQSYSTPLTFGGGTKVEIKTTTPAPRPPTPAPTIASQPLSLRPEACRPAAGGAVHTRGLDFACDFWVLVVVGGVLACYSLLVTVAFIIFWVRSKRSRLLHSDYMNMTPRRPGPTRKHYQPYAPPRDFAAYRSKRGRKKLLYIFKQPFMRPVQTTQEEDGCSCRFPEEEEGGCELRVKFSRSADAPAYKQGQNQLYNELNLGRREEYDVLDKRRGRDPEMGGKPRRKNPQEGLYNELQKDKMAEAYSEIGMKGERRRGKGHDGLYQGLSTATKDTYDALHMQALPPR

SEQ ID NO: 288 - protein, 514 aa, synthetic construct
  REGION 1..514: note = single chain variable fragment
QLQLQESGSGLVKPSQTLSLTCAVSGGSISSGGYSWSWIRQPPGKGLEWIGYIYHSGSTYYNPSLKSRVTISVDRSKNQFSLKLSSVTAADTAVYYCASIKFWFAGINYFFPWGQGTLVTVSSGGGGSGGGGSGGGGSGGDIQMTQSPSSLSASVGDRVTITCRASQSISSYLNWYQQKPGKAPKLLIYAASSLQSGVPSRFSGSGSGTDFTLTISSLQPEDFATYYCQQSYSTPLTFGGGTKVEIKTTTPAPRPPTPAPTIASQPLSLRPEACRPAAGGAVHTRGLDFACDFWVLVVVGGVLACYSLLVTVAFIIFWVRSKRSRLLHSDYMNMTPRRPGPTRKHYQPYAPPRDFAAYRSKRGRKKLLYIFKQPFMRPVQTTQEEDGCSCRFPEEEEGGCELRVKFSRSADAPAYKQGQNQLYNELNLGRREEYDVLDKRRGRDPEMGGKPRRKNPQEGLYNELQKDKMAEAYSEIGMKGERRRGKGHDGLYQGLSTATKDTYDALHMQALPPR

SEQ ID NO: 289 - protein, 510 aa, synthetic construct
  REGION 1..510: note = single chain variable fragment
EVQLVESGGGLVQPGGSLRLSCAASGFTFSSYWMHWVRQAPGKGLVWVSRINSDGSSTSYADSVKGRFTISRDNAKNTLYLQMNSLRAEDTAVYYCASGFLGMGSNFIWGQGTLVTVSSGGGGSGGGGSGGGGSGGDIQMTQSPSSLSASVGDRVTITCRASQSISSYLNWYQQKPGKAPKLLIYAASSLQSGVPSRFSGSGSGTDFTLTISSLQPEDFATYYCQQSYSTPLTFGGGTKVEIKTTTPAPRPPTPAPTIASQPLSLRPEACRPAAGGAVHTRGLDFACDFWVLVVVGGVLACYSLLVTVAFIIFWVRSKRSRLLHSDYMNMTPRRPGPTRKHYQPYAPPRDFAAYRSKRGRKKLLYIFKQPFMRPVQTTQEEDGCSCRFPEEEEGGCELRVKFSRSADAPAYKQGQNQLYNELNLGRREEYDVLDKRRGRDPEMGGKPRRKNPQEGLYNELQKDKMAEAYSEIGMKGERRRGKGHDGLYQGLSTATKDTYDALHMQALPPR

SEQ ID NO: 290 - protein, 510 aa, synthetic construct
  REGION 1..510: note = single chain variable fragment
QVQLQESGPGLVKPSQTLSLTCTVSGGSISSGGYYWSWIRQHPGKGLEWIGYIYYSGSTYYNPSLKSLVTISVDTSKNQFSLKLSSVTAADTAVYYCASGDRARYFDLWGRGTLVTVSSGGGGSGGGGSGGGGSGGDIQMTQSPSSLSASVGDRVTITCRASQSISSYLNWYQQKPGKAPKLLIYAASSLQSGVPSRFSGSGSGTDFTLTISSLQPEDFATYYCQQSYSTPLTFGGGTKVEIKTTTPAPRPPTPAPTIASQPLSLRPEACRPAAGGAVHTRGLDFACDFWVLVVVGGVLACYSLLVTVAFIIFWVRSKRSRLLHSDYMNMTPRRPGPTRKHYQPYAPPRDFAAYRSKRGRKKLLYIFKQPFMRPVQTTQEEDGCSCRFPEEEEGGCELRVKFSRSADAPAYKQGQNQLYNELNLGRREEYDVLDKRRGRDPEMGGKPRRKNPQEGLYNELQKDKMAEAYSEIGMKGERRRGKGHDGLYQGLSTATKDTYDALHMQALPPR

SEQ ID NO: 291 - protein, 514 aa, synthetic construct
  REGION 1..514: note = single chain variable fragment
EVQLVESGGGLVQPGGSLRLSCAASGFTFSSYWMHWVRQAPGKGLVWVSRINSDGSSTSYADSVKGRFTISRDNAKNTLYLQMNSLRAEDTAVYYCARYPRGYHQMVDAFDIWGQGTMVTVSSGGGGSGGGGSGGGGSGGDIQMTQSPSSLSASVGDRVTITCRASQSISSYLNWYQQKPGKAPKLLIYAASSLQSGVPSRFSGSGSGTDFTLTISSLQPEDFATYYCQQSYSTPLTFGGGTKVEIKTTTPAPRPPTPAPTIASQPLSLRPEACRPAAGGAVHTRGLDFACDFWVLVVVGGVLACYSLLVTVAFIIFWVRSKRSRLLHSDYMNMTPRRPGPTRKHYQPYAPPRDFAAYRSKRGRKKLLYIFKQPFMRPVQTTQEEDGCSCRFPEEEEGGCELRVKFSRSADAPAYKQGQNQLYNELNLGRREEYDVLDKRRGRDPEMGGKPRRKNPQEGLYNELQKDKMAEAYSEIGMKGERRRGKGHDGLYQGLSTATKDTYDALHMQALPPR

SEQ ID NO: 292 - protein, 517 aa, synthetic construct
  REGION 1..517: note = single chain variable fragment
QLQLQESGPGLVKPSETLSLTCTVSGGSISSSSYYWGWIRQPPGKGLEWIGSIYYSGSTYYNPSLKSRVTISVDTSKNQFSLKLSSVTAADTAVYYCARVRFLAARTTIPEANFLWGQGTLVTVSSGGGGSGGGGSGGGGSGGDIQMTQSPSSLSASVGDRVTITCRASQSISSYLNWYQQKPGKAPKLLIYAASSLQSGVPSRFSGSGSGTDFTLTISSLQPEDFATYYCQQSYSTPLTFGGGTKVEIKTTTPAPRPPTPAPTIASQPLSLRPEACRPAAGGAVHTRGLDFACDFWVLVVVGGVLACYSLLVTVAFIIFWVRSKRSRLLHSDYMNMTPRRPGPTRKHYQPYAPPRDFAAYRSKRGRKKLLYIFKQPFMRPVQTTQEEDGCSCRFPEEEEGGCELRVKFSRSADAPAYKQGQNQLYNELNLGRREEYDVLDKRRGRDPEMGGKPRRKNPQEGLYNELQKDKMAEAYSEIGMKGERRRGKGHDGLYQGLSTATKDTYDALHMQALPPR

SEQ ID NO: 293 - protein, 509 aa, synthetic construct
  REGION 1..509: note = single chain variable fragment
EVQLVESGGGLVQPGGSLRLSCAASGFTFSSYSMNWVRQAPGKGLEWVSYISSSSSTIYYADSVKGRFTISRDNAKNSLYLQMNSLRAEDTAVYYCARVLSRARFDYWGQGTLVTVSSGGGGSGGGGSGGGGSGGDIQMTQSPSSLSASVGDRVTITCRASQSISSYLNWYQQKPGKAPKLLIYAASSLQSGVPSRFSGSGSGTDFTLTISSLQPEDFATYYCQQSYSTPLTFGGGTKVEIKTTTPAPRPPTPAPTIASQPLSLRPEACRPAAGGAVHTRGLDFACDFWVLVVVGGVLACYSLLVTVAFIIFWVRSKRSRLLHSDYMNMTPRRPGPTRKHYQPYAPPRDFAAYRSKRGRKKLLYIFKQPFMRPVQTTQEEDGCSCRFPEEEEGGCELRVKFSRSADAPAYKQGQNQLYNELNLGRREEYDVLDKRRGRDPEMGGKPRRKNPQEGLYNELQKDKMAEAYSEIGMKGERRRGKGHDGLYQGLSTATKDTYDALHMQALPPR

SEQ ID NO: 294 - protein, 508 aa, synthetic construct
  REGION 1..508: note = single chain variable fragment
EVQLVESGGGLVKPGGSLRLSCAASGFTFSSYSMNWVRQAPGKGLEWVSSISSSSSYIYYADSVKGRFTISRDNAKNSLYLQMNSLRAEDTAVYYCARLRGRVFDPWGQGTLVTVSSGGGGSGGGGSGGGGSGGDIQMTQSPSSLSASVGDRVTITCRASQSISSYLNWYQQKPGKAPKLLIYAASSLQSGVPSRFSGSGSGTDFTLTISSLQPEDFATYYCQQSYSTPLTFGGGTKVEIKTTTPAPRPPTPAPTIASQPLSLRPEACRPAAGGAVHTRGLDFACDFWVLVVVGGVLACYSLLVTVAFIIFWVRSKRSRLLHSDYMNMTPRRPGPTRKHYQPYAPPRDFAAYRSKRGRKKLLYIFKQPFMRPVQTTQEEDGCSCRFPEEEEGGCELRVKFSRSADAPAYKQGQNQLYNELNLGRREEYDVLDKRRGRDPEMGGKPRRKNPQEGLYNELQKDKMAEAYSEIGMKGERRRGKGHDGLYQGLSTATKDTYDALHMQALPPR

SEQ ID NO: 295 - protein, 514 aa, synthetic construct
  REGION 1..514: note = single chain variable fragment
QLQLQESGPGLVKPSETLSLTCTVSGGSISSSSYYWGWIRQPPGKGLEWIGSIYYSGSTYYNPSLKSRVTISVDTSKNQFSLKLSSVTAADTAVYYCARIKFTSFLYVHGFLWGQGTLVTVSSGGGGSGGGGSGGGGSGGDIQMTQSPSSLSASVGDRVTITCRASQSISSYLNWYQQKPGKAPKLLIYAASSLQSGVPSRFSGSGSGTDFTLTISSLQPEDFATYYCQQSYSTPLTFGGGTKVEIKTTTPAPRPPTPAPTIASQPLSLRPEACRPAAGGAVHTRGLDFACDFWVLVVVGGVLACYSLLVTVAFIIFWVRSKRSRLLHSDYMNMTPRRPGPTRKHYQPYAPPRDFAAYRSKRGRKKLLYIFKQPFMRPVQTTQEEDGCSCRFPEEEEGGCELRVKFSRSADAPAYKQGQNQLYNELNLGRREEYDVLDKRRGRDPEMGGKPRRKNPQEGLYNELQKDKMAEAYSEIGMKGERRRGKGHDGLYQGLSTATKDTYDALHMQALPPR

SEQ ID NO: 296 - protein, 513 aa, synthetic construct
  REGION 1..513: note = single chain variable fragment
QVQLVQSGAEVKKPGASVKVSCKASGYTFTSYAMHWVRQAPGQRLEWMGWINAGNGNTKYSQKFQGRVTITRDTSASTAYMELSSLRSEDTAVYYCARGQRWLYLGGIRRHWGQGTLVTVSSGGGGSGGGGSGGGGSGGDIQMTQSPSSLSASVGDRVTITCRASQSISSYLNWYQQKPGKAPKLLIYAASSLQSGVPSRFSGSGSGTDFTLTISSLQPEDFATYYCQQSYSTPLTFGGGTKVEIKTTTPAPRPPTPAPTIASQPLSLRPEACRPAAGGAVHTRGLDFACDFWVLVVVGGVLACYSLLVTVAFIIFWVRSKRSRLLHSDYMNMTPRRPGPTRKHYQPYAPPRDFAAYRSKRGRKKLLYIFKQPFMRPVQTTQEEDGCSCRFPEEEEGGCELRVKFSRSADAPAYKQGQNQLYNELNLGRREEYDVLDKRRGRDPEMGGKPRRKNPQEGLYNELQKDKMAEAYSEIGMKGERRRGKGHDGLYQGLSTATKDTYDALHMQALPPR

SEQ ID NO: 297 - protein, 511 aa, synthetic construct
  REGION 1..511: note = single chain variable fragment
QVQLQESGPGLVKPSETLSLTCTVSGGSISSYYWSWIRQPPGKGLEWIGYIYYSGSTNYNPSLKSRVTISVDTSKNQFSLKLSSVTAADTAVYYCAREWIPSRPYYFDYWGQGTLVTVSSGGGGSGGGGSGGGGSGGDIQMTQSPSSLSASVGDRVTITCRASQSISSYLNWYQQKPGKAPKLLIYAASSLQSGVPSRFSGSGSGTDFTLTISSLQPEDFATYYCQQSYSTPLTFGGGTKVEIKTTTPAPRPPTPAPTIASQPLSLRPEACRPAAGGAVHTRGLDFACDFWVLVVVGGVLACYSLLVTVAFIIFWVRSKRSRLLHSDYMNMTPRRPGPTRKHYQPYAPPRDFAAYRSKRGRKKLLYIFKQPFMRPVQTTQEEDGCSCRFPEEEEGGCELRVKFSRSADAPAYKQGQNQLYNELNLGRREEYDVLDKRRGRDPEMGGKPRRKNPQEGLYNELQKDKMAEAYSEIGMKGERRRGKGHDGLYQGLSTATKDTYDALHMQALPPR

SEQ ID NO: 298 - protein, 511 aa, synthetic construct
  REGION 1..511: note = single chain variable fragment
QVQLQESGPGLVKPSQTLSLTCTVSGGSISSGGYYWSWIRQPPGKGLEWIGYIYYSGSTYYNPSLKSRVTISVDTSKNQFSLKLSSVTAADTAVYYCARESTGTGAFDIWGQGTMVTVSSGGGGSGGGGSGGGGSGGDIQMTQSPSSLSASVGDRVTITCRASQSISSYLNWYQQKPGKAPKLLIYAASSLQSGVPSRFSGSGSGTDFTLTISSLQPEDFATYYCQQSYSTPLTFGGGTKVEIKTTTPAPRPPTPAPTIASQPLSLRPEACRPAAGGAVHTRGLDFACDFWVLVVVGGVLACYSLLVTVAFIIFWVRSKRSRLLHSDYMNMTPRRPGPTRKHYQPYAPPRDFAAYRSKRGRKKLLYIFKQPFMRPVQTTQEEDGCSCRFPEEEEGGCELRVKFSRSADAPAYKQGQNQLYNELNLGRREEYDVLDKRRGRDPEMGGKPRRKNPQEGLYNELQKDKMAEAYSEIGMKGERRRGKGHDGLYQGLSTATKDTYDALHMQALPPR

SEQ ID NO: 299 - protein, 513 aa, synthetic construct
  REGION 1..513: note = single chain variable fragment
EVQLVESGGGVVRPGGSLRLSCAASGFTFDDYGMSWVRQAPGKGLEWVSGINWNGGSTGYADSVKGRFTISRDNAKNSLYLQMNSLRAEDTALYHCARERYRRVLHWYFDLWGRGTLVTVSSGGGGSGGGGSGGGGSGGDIQMTQSPSSLSASVGDRVTITCRASQSISSYLNWYQQKPGKAPKLLIYAASSLQSGVPSRFSGSGSGTDFTLTISSLQPEDFATYYCQQSYSTPLTFGGGTKVEIKTTTPAPRPPTPAPTIASQPLSLRPEACRPAAGGAVHTRGLDFACDFWVLVVVGGVLACYSLLVTVAFIIFWVRSKRSRLLHSDYMNMTPRRPGPTRKHYQPYAPPRDFAAYRSKRGRKKLLYIFKQPFMRPVQTTQEEDGCSCRFPEEEEGGCELRVKFSRSADAPAYKQGQNQLYNELNLGRREEYDVLDKRRGRDPEMGGKPRRKNPQEGLYNELQKDKMAEAYSEIGMKGERRRGKGHDGLYQGLSTATKDTYDALHMQALPPR

SEQ ID NO: 300 - protein, 507 aa, synthetic construct
  REGION 1..507: note = single chain variable fragment
QVQLVQSGAEVKKPGASVKVSCKASGYTFTSYDINWVRQATGQGLEWMGWMNPNSGNTGYAQKFQGRVTMTRNTSISTAYMELSSLRSEDTAVYYCAREPDAFDIWGQGTMVTVSSGGGGSGGGGSGGGGSGGDIQMTQSPSSLSASVGDRVTITCRASQSISSYLNWYQQKPGKAPKLLIYAASSLQSGVPSRFSGSGSGTDFTLTISSLQPEDFATYYCQQSYSTPLTFGGGTKVEIKTTTPAPRPPTPAPTIASQPLSLRPEACRPAAGGAVHTRGLDFACDFWVLVVVGGVLACYSLLVTVAFIIFWVRSKRSRLLHSDYMNMTPRRPGPTRKHYQPYAPPRDFAAYRSKRGRKKLLYIFKQPFMRPVQTTQEEDGCSCRFPEEEEGGCELRVKFSRSADAPAYKQGQNQLYNELNLGRREEYDVLDKRRGRDPEMGGKPRRKNPQEGLYNELQKDKMAEAYSEIGMKGERRRGKGHDGLYQGLSTATKDTYDALHMQALPPR

SEQ ID NO: 301 - protein, 513 aa, synthetic construct
  REGION 1..513: note = single chain variable fragment
QVQLQESGPGLVKPSQTLSLTCTVSGGSISSGGYYWSWIRQPPGKGLEWIGYIYYSGSTYYNPSLKSRVTISVDTSKNQFSLKLSSVTAADTAVYYCAREHMGTIPYYFDYWGQGTLVTVSSGGGGSGGGGSGGGGSGGDIQMTQSPSSLSASVGDRVTITCRASQSISSYLNWYQQKPGKAPKLLIYAASSLQSGVPSRFSGSGSGTDFTLTISSLQPEDFATYYCQQSYSTPLTFGGGTKVEIKTTTPAPRPPTPAPTIASQPLSLRPEACRPAAGGAVHTRGLDFACDFWVLVVVGGVLACYSLLVTVAFIIFWVRSKRSRLLHSDYMNMTPRRPGPTRKHYQPYAPPRDFAAYRSKRGRKKLLYIFKQPFMRPVQTTQEEDGCSCRFPEEEEGGCELRVKFSRSADAPAYKQGQNQLYNELNLGRREEYDVLDKRRGRDPEMGGKPRRKNPQEGLYNELQKDKMAEAYSEIGMKGERRRGKGHDGLYQGLSTATKDTYDALHMQALPPR

SEQ ID NO: 302 - protein, 511 aa, synthetic construct
  REGION 1..511: note = single chain variable fragment
QVQLQESGPGLVKPSQTLSLTCTVSGGSISSGGYYWSWIRQPPGKGLEWIGYIYYSGSTYYNPSLKSRVTISVDTSKNQFSLKLSSVTAADTAVYYCAREEFGYGDVLYWGQGTLVTVSSGGGGSGGGGSGGGGSGGDIQMTQSPSSLSASVGDRVTITCRASQSISSYLNWYQQKPGKAPKLLIYAASSLQSGVPSRFSGSGSGTDFTLTISSLQPEDFATYYCQQSYSTPLTFGGGTKVEIKTTTPAPRPPTPAPTIASQPLSLRPEACRPAAGGAVHTRGLDFACDFWVLVVVGGVLACYSLLVTVAFIIFWVRSKRSRLLHSDYMNMTPRRPGPTRKHYQPYAPPRDFAAYRSKRGRKKLLYIFKQPFMRPVQTTQEEDGCSCRFPEEEEGGCELRVKFSRSADAPAYKQGQNQLYNELNLGRREEYDVLDKRRGRDPEMGGKPRRKNPQEGLYNELQKDKMAEAYSEIGMKGERRRGKGHDGLYQGLSTATKDTYDALHMQALPPR

SEQ ID NO: 303 - protein, 511 aa, synthetic construct
  REGION 1..511: note = single chain variable fragment
QVQLQESGPGLVKPSQTLSLTCTVSGGSISSGDYYWSWIRQPPGKGLEWIGYIYYSGSTYYNPSLKSRVTISVDTSKNQFSLKLSSVTAADTAVYYCAREDVVKGAFDIWGQGTMVTVSSGGGGSGGGGSGGGGSGGDIQMTQSPSSLSASVGDRVTITCRASQSISSYLNWYQQKPGKAPKLLIYAASSLQSGVPSRFSGSGSGTDFTLTISSLQPEDFATYYCQQSYSTPLTFGGGTKVEIKTTTPAPRPPTPAPTIASQPLSLRPEACRPAAGGAVHTRGLDFACDFWVLVVVGGVLACYSLLVTVAFIIFWVRSKRSRLLHSDYMNMTPRRPGPTRKHYQPYAPPRDFAAYRSKRGRKKLLYIFKQPFMRPVQTTQEEDGCSCRFPEEEEGGCELRVKFSRSADAPAYKQGQNQLYNELNLGRREEYDVLDKRRGRDPEMGGKPRRKNPQEGLYNELQKDKMAEAYSEIGMKGERRRGKGHDGLYQGLSTATKDTYDALHMQALPPR

SEQ ID NO: 304 - protein, 512 aa, synthetic construct
  REGION 1..512: note = single chain variable fragment
EVQLVESGGGLVQPGGSLRLSCAASGFTFSSYSMNWVRQAPGKGLEWVSYISSSSSTIYYADSVKGRFTISRDNAKNSLYLQMNSLRAEDTAVYYCAREDFSHKLGYFQHWGQGTLVTVSSGGGGSGGGGSGGGGSGGDIQMTQSPSSLSASVGDRVTITCRASQSISSYLNWYQQKPGKAPKLLIYAASSLQSGVPSRFSGSGSGTDFTLTISSLQPEDFATYYCQQSYSTPLTFGGGTKVEIKTTTPAPRPPTPAPTIASQPLSLRPEACRPAAGGAVHTRGLDFACDFWVLVVVGGVLACYSLLVTVAFIIFWVRSKRSRLLHSDYMNMTPRRPGPTRKHYQPYAPPRDFAAYRSKRGRKKLLYIFKQPFMRPVQTTQEEDGCSCRFPEEEEGGCELRVKFSRSADAPAYKQGQNQLYNELNLGRREEYDVLDKRRGRDPEMGGKPRRKNPQEGLYNELQKDKMAEAYSEIGMKGERRRGKGHDGLYQGLSTATKDTYDALHMQALPPR

SEQ ID NO: 305 - protein, 505 aa, synthetic construct
  REGION 1..505: note = single chain variable fragment
QVQLVESGGGLVKPGGSLRLSCAASGFTFSDYYMSWIRQAPGKGLEWVSYISSSGSTIYYADSVKGRFTISRDNAKNSLYLQMNSLRAEDTAVYYCARDYDYVWGQGTLVTVSSGGGGSGGGGSGGGGSGGDIQMTQSPSSLSASVGDRVTITCRASQSISSYLNWYQQKPGKAPKLLIYAASSLQSGVPSRFSGSGSGTDFTLTISSLQPEDFATYYCQQSYSTPLTFGGGTKVEIKTTTPAPRPPTPAPTIASQPLSLRPEACRPAAGGAVHTRGLDFACDFWVLVVVGGVLACYSLLVTVAFIIFWVRSKRSRLLHSDYMNMTPRRPGPTRKHYQPYAPPRDFAAYRSKRGRKKLLYIFKQPFMRPVQTTQEEDGCSCRFPEEEEGGCELRVKFSRSADAPAYKQGQNQLYNELNLGRREEYDVLDKRRGRDPEMGGKPRRKNPQEGLYNELQKDKMAEAYSEIGMKGERRRGKGHDGLYQGLSTATKDTYDALHMQALPPR

SEQ ID NO: 306 - protein, 511 aa, synthetic construct
  REGION 1..511: note = single chain variable fragment
QVQLQESGPGLVKPSQTLSLTCTVSGGSISSGDYYWSWIRQPPGKGLEWIGYIYYSGSTYYNPSLKSRVTISVDTSKNQFSLKLSSVTAADTAVYYCARDRRDWDWFDPWGQGTLVTVSSGGGGSGGGGSGGGGSGGDIQMTQSPSSLSASVGDRVTITCRASQSISSYLNWYQQKPGKAPKLLIYAASSLQSGVPSRFSGSGSGTDFTLTISSLQPEDFATYYCQQSYSTPLTFGGGTKVEIKTTTPAPRPPTPAPTIASQPLSLRPEACRPAAGGAVHTRGLDFACDFWVLVVVGGVLACYSLLVTVAFIIFWVRSKRSRLLHSDYMNMTPRRPGPTRKHYQPYAPPRDFAAYRSKRGRKKLLYIFKQPFMRPVQTTQEEDGCSCRFPEEEEGGCELRVKFSRSADAPAYKQGQNQLYNELNLGRREEYDVLDKRRGRDPEMGGKPRRKNPQEGLYNELQKDKMAEAYSEIGMKGERRRGKGHDGLYQGLSTATKDTYDALHMQALPPR

SEQ ID NO: 307 - protein, 510 aa, synthetic construct
  REGION 1..510: note = single chain variable fragment
QVQLQESGPGLVKPSGTLSLTCAVSGGSISSSNWWSWVRQPPGKGLEWIGEIYHSGSTNYNPSLKSRVTISVDKSKNQFSLKLSSVTAADTAVYYCARDQQALKYRVDWGQGTLVTVSSGGGGSGGGGSGGGGSGGDIQMTQSPSSLSASVGDRVTITCRASQSISSYLNWYQQKPGKAPKLLIYAASSLQSGVPSRFSGSGSGTDFTLTISSLQPEDFATYYCQQSYSTPLTFGGGTKVEIKTTTPAPRPPTPAPTIASQPLSLRPEACRPAAGGAVHTRGLDFACDFWVLVVVGGVLACYSLLVTVAFIIFWVRSKRSRLLHSDYMNMTPRRPGPTRKHYQPYAPPRDFAAYRSKRGRKKLLYIFKQPFMRPVQTTQEEDGCSCRFPEEEEGGCELRVKFSRSADAPAYKQGQNQLYNELNLGRREEYDVLDKRRGRDPEMGGKPRRKNPQEGLYNELQKDKMAEAYSEIGMKGERRRGKGHDGLYQGLSTATKDTYDALHMQALPPR

SEQ ID NO: 308 - protein, 509 aa, synthetic construct
  REGION 1..509: note = single chain variable fragment
QVQLVQSGAEVKKPGASVKVSCKASGYTFTSYGISWVRQAPGQGLEWMGWISAYNGNTNYAQKLQGRVTMTTDTSTSTAYMELRSLRSDDTAVYYCARDLTLGCFDYWGQGTLVTVSSGGGGSGGGGSGGGGSGGDIQMTQSPSSLSASVGDRVTITCRASQSISSYLNWYQQKPGKAPKLLIYAASSLQSGVPSRFSGSGSGTDFTLTISSLQPEDFATYYCQQSYSTPLTFGGGTKVEIKTTTPAPRPPTPAPTIASQPLSLRPEACRPAAGGAVHTRGLDFACDFWVLVVVGGVLACYSLLVTVAFIIFWVRSKRSRLLHSDYMNMTPRRPGPTRKHYQPYAPPRDFAAYRSKRGRKKLLYIFKQPFMRPVQTTQEEDGCSCRFPEEEEGGCELRVKFSRSADAPAYKQGQNQLYNELNLGRREEYDVLDKRRGRDPEMGGKPRRKNPQEGLYNELQKDKMAEAYSEIGMKGERRRGKGHDGLYQGLSTATKDTYDALHMQALPPR

SEQ ID NO: 309 - protein, 509 aa, synthetic construct
  REGION 1..509: note = single chain variable fragment
EVQLVESGGGLVQPGGSLRLSCAASGFTVSSNYMSWVRQAPGKGLEWVSVIYSGGSTYYADSVKGRFTISRDNSKNTLYLQMNSLRAEDTAVYYCARDGSNSWYFDLWGRGTLVTVSSGGGGSGGGGSGGGGSGGDIQMTQSPSSLSASVGDRVTITCRASQSISSYLNWYQQKPGKAPKLLIYAASSLQSGVPSRFSGSGSGTDFTLTISSLQPEDFATYYCQQSYSTPLTFGGGTKVEIKTTTPAPRPPTPAPTIASQPLSLRPEACRPAAGGAVHTRGLDFACDFWVLVVVGGVLACYSLLVTVAFIIFWVRSKRSRLLHSDYMNMTPRRPGPTRKHYQPYAPPRDFAAYRSKRGRKKLLYIFKQPFMRPVQTTQEEDGCSCRFPEEEEGGCELRVKFSRSADAPAYKQGQNQLYNELNLGRREEYDVLDKRRGRDPEMGGKPRRKNPQEGLYNELQKDKMAEAYSEIGMKGERRRGKGHDGLYQGLSTATKDTYDALHMQALPPR

SEQ ID NO: 310 - protein, 509 aa, synthetic construct
  REGION 1..509: note = single chain variable fragment
QVQLVESGGGVVQPGRSLRLSCAASGFTFSSYGMHWVRQAPGKGLEWVAVIWYDGSNKYYADSVKGRFTISRDNSKNTLYLQMNSLRAEDTAVYYCARAFLFLSFSVWGQGTLVTVSSGGGGSGGGGSGGGGSGGDIQMTQSPSSLSASVGDRVTITCRASQSISSYLNWYQQKPGKAPKLLIYAASSLQSGVPSRFSGSGSGTDFTLTISSLQPEDFATYYCQQSYSTPLTFGGGTKVEIKTTTPAPRPPTPAPTIASQPLSLRPEACRPAAGGAVHTRGLDFACDFWVLVVVGGVLACYSLLVTVAFIIFWVRSKRSRLLHSDYMNMTPRRPGPTRKHYQPYAPPRDFAAYRSKRGRKKLLYIFKQPFMRPVQTTQEEDGCSCRFPEEEEGGCELRVKFSRSADAPAYKQGQNQLYNELNLGRREEYDVLDKRRGRDPEMGGKPRRKNPQEGLYNELQKDKMAEAYSEIGMKGERRRGKGHDGLYQGLSTATKDTYDALHMQALPPR

SEQ ID NO: 311 - protein, 512 aa, synthetic construct
  REGION 1..512: note = single chain variable fragment
EVQLVESGGVVVQPGGSLRLSCAASGFTFDDYTMHWVRQAPGKGLEWVSLISWDGGSTYYADSVKGRFTISRDNSKNSLYLQMNSLRTEDTALYYCAKGIFYSSKEDFDYWGQGTLVTVSSGGGGSGGGGSGGGGSGGDIQMTQSPSSLSASVGDRVTITCRASQSISSYLNWYQQKPGKAPKLLIYAASSLQSGVPSRFSGSGSGTDFTLTISSLQPEDFATYYCQQSYSTPLTFGGGTKVEIKTTTPAPRPPTPAPTIASQPLSLRPEACRPAAGGAVHTRGLDFACDFWVLVVVGGVLACYSLLVTVAFIIFWVRSKRSRLLHSDYMNMTPRRPGPTRKHYQPYAPPRDFAAYRSKRGRKKLLYIFKQPFMRPVQTTQEEDGCSCRFPEEEEGGCELRVKFSRSADAPAYKQGQNQLYNELNLGRREEYDVLDKRRGRDPEMGGKPRRKNPQEGLYNELQKDKMAEAYSEIGMKGERRRGKGHDGLYQGLSTATKDTYDALHMQALPPR

SEQ ID NO: 312 - protein, 515 aa, synthetic construct
  REGION 1..515: note = single chain variable fragment
EVQLVESGGVVVQPGGSLRLSCAASGFTFDDYTMHWVRQAPGKGLEWVSLISWDGGSTYYADSVKGRFTISRDNSKNSLYLQMNSLRTEDTALYYCAKDIWIFYSSNPKPTVYWGQGTLVTVSSGGGGSGGGGSGGGGSGGDIQMTQSPSSLSASVGDRVTITCRASQSISSYLNWYQQKPGKAPKLLIYAASSLQSGVPSRFSGSGSGTDFTLTISSLQPEDFATYYCQQSYSTPLTFGGGTKVEIKTTTPAPRPPTPAPTIASQPLSLRPEACRPAAGGAVHTRGLDFACDFWVLVVVGGVLACYSLLVTVAFIIFWVRSKRSRLLHSDYMNMTPRRPGPTRKHYQPYAPPRDFAAYRSKRGRKKLLYIFKQPFMRPVQTTQEEDGCSCRFPEEEEGGCELRVKFSRSADAPAYKQGQNQLYNELNLGRREEYDVLDKRRGRDPEMGGKPRRKNPQEGLYNELQKDKMAEAYSEIGMKGERRRGKGHDGLYQGLSTATKDTYDALHMQALPPR

SEQ ID NO: 313 - protein, 513 aa, synthetic construct
  REGION 1..513: note = single chain variable fragment
QVQLVQSGSELKKPGASVKVSCKASGYTFTSYAMNWVRQAPGQGLEWMGWINTNTGNPTYAQGFTGRFVFSFDTSVSTAYLQICSLKAEDTAVYYCARKDQTLTYGNWFDPWGQGTLVTVSSGGGGSGGGGSGGGGSGGDIQMTQSPSSLSASVGDRVTITCRASQSISSYLNWYQQKPGKAPKLLIYAASSLQSGVPSRFSGSGSGTDFTLTISSLQPEDFATYYCQQSYSTPLTFGGGTKVEIKTTTPAPRPPTPAPTIASQPLSLRPEACRPAAGGAVHTRGLDFACDFWVLVVVGGVLACYSLLVTVAFIIFWVRSKRSRLLHSDYMNMTPRRPGPTRKHYQPYAPPRDFAAYRSKRGRKKLLYIFKQPFMRPVQTTQEEDGCSCRFPEEEEGGCELRVKFSRSADAPAYKQGQNQLYNELNLGRREEYDVLDKRRGRDPEMGGKPRRKNPQEGLYNELQKDKMAEAYSEIGMKGERRRGKGHDGLYQGLSTATKDTYDALHMQALPPR

SEQ ID NO: 314 - protein, 509 aa, synthetic construct
  REGION 1..509: note = single chain variable fragment
QVQLQESGPGLVKPSETLSLTCTVSGGSVSSGSYYWSWIRQPPGKGLEWIGYIYYSGSTNYNPSLKSRVTISVDTSKNQFSLKLSSVTAADTAVYYCARDHYERGLYWGQGTLVTVSSGGGGSGGGGSGGGGSGGDIQMTQSPSSLSASVGDRVTITCRASQSISSYLNWYQQKPGKAPKLLIYAASSLQSGVPSRFSGSGSGTDFTLTISSLQPEDFATYYCQQSYSTPLTFGGGTKVEIKTTTPAPRPPTPAPTIASQPLSLRPEACRPAAGGAVHTRGLDFACDFWVLVVVGGVLACYSLLVTVAFIIFWVRSKRSRLLHSDYMNMTPRRPGPTRKHYQPYAPPRDFAAYRSKRGRKKLLYIFKQPFMRPVQTTQEEDGCSCRFPEEEEGGCELRVKFSRSADAPAYKQGQNQLYNELNLGRREEYDVLDKRRGRDPEMGGKPRRKNPQEGLYNELQKDKMAEAYSEIGMKGERRRGKGHDGLYQGLSTATKDTYDALHMQALPPR

SEQ ID NO: 315 - protein, 509 aa, synthetic construct
  REGION 1..509: note = single chain variable fragment
QVQLVESGGGLVKPGGSLRLSCAASGFTFSDYYMSWIRQAPGKGLEWVSYISSSGSTIYYADSVKGRFTISRDNAKNSLYLQMNSLRAEDTAVYYCARYMYNWYFDLWGRGTLVTVSSGGGGSGGGGSGGGGSGGDIQMTQSPSSVSASVGDRVTITCRASQGISSWLAWYQQKPGKAPKLLIYAASSLQSGVPSRFSGSGSGTDFTLTISSLQPEDFATYYCQQANSFPLTFGGGTKVEIKTTTPAPRPPTPAPTIASQPLSLRPEACRPAAGGAVHTRGLDFACDFWVLVVVGGVLACYSLLVTVAFIIFWVRSKRSRLLHSDYMNMTPRRPGPTRKHYQPYAPPRDFAAYRSKRGRKKLLYIFKQPFMRPVQTTQEEDGCSCRFPEEEEGGCELRVKFSRSADAPAYKQGQNQLYNELNLGRREEYDVLDKRRGRDPEMGGKPRRKNPQEGLYNELQKDKMAEAYSEIGMKGERRRGKGHDGLYQGLSTATKDTYDALHMQALPPR

SEQ ID NO: 316 - protein, 508 aa, synthetic construct
  REGION 1..508: note = single chain variable fragment
QVQLVESGGGLVKPGGSLRLSCAASGFTFSDYYMSWIRQAPGKGLEWVSYISSSGSTIYYADSVKGRFTISRDNAKNSLYLQMNSLRAEDTAVYYCARDRRPAFDIWGQGTMVTVSSGGGGSGGGGSGGGGSGGDIQMTQSPSSVSASVGDRVTITCRASQGISSWLAWYQQKPGKAPKLLIYAASSLQSGVPSRFSGSGSGTDFTLTISSLQPEDFATYYCQQANSFPLTFGGGTKVEIKTTTPAPRPPTPAPTIASQPLSLRPEACRPAAGGAVHTRGLDFACDFWVLVVVGGVLACYSLLVTVAFIIFWVRSKRSRLLHSDYMNMTPRRPGPTRKHYQPYAPPRDFAAYRSKRGRKKLLYIFKQPFMRPVQTTQEEDGCSCRFPEEEEGGCELRVKFSRSADAPAYKQGQNQLYNELNLGRREEYDVLDKRRGRDPEMGGKPRRKNPQEGLYNELQKDKMAEAYSEIGMKGERRRGKGHDGLYQGLSTATKDTYDALHMQALPPR

SEQ ID NO: 317 - protein, 510 aa, synthetic construct
  REGION 1..510: note = single chain variable fragment
QVQLVESGGGLVKPGGSLRLSCAASGFTFSDYYMSWIRQAPGKGLEWVSYISSSGSTIYYADSVKGRFTISRDNAKNSLYLQMNSLRAEDTAVYYCAVHLKRRPYFDYWGQGTLVTVSSGGGGSGGGGSGGGGSGGAIQLTQSPSSLSASVGDRVTITCRASQGISSALAWYQQKPGKAPKLLIYDASSLESGVPSRFSGSGSGTDFTLTISSLQPEDFATYYCQQFNSYPLTFGGGTKVEIKTTTPAPRPPTPAPTIASQPLSLRPEACRPAAGGAVHTRGLDFACDFWVLVVVGGVLACYSLLVTVAFIIFWVRSKRSRLLHSDYMNMTPRRPGPTRKHYQPYAPPRDFAAYRSKRGRKKLLYIFKQPFMRPVQTTQEEDGCSCRFPEEEEGGCELRVKFSRSADAPAYKQGQNQLYNELNLGRREEYDVLDKRRGRDPEMGGKPRRKNPQEGLYNELQKDKMAEAYSEIGMKGERRRGKGHDGLYQGLSTATKDTYDALHMQALPPR

SEQ ID NO: 318 - protein, 509 aa, synthetic construct
  REGION 1..509: note = single chain variable fragment
QVQLVESGGGLVKPGGSLRLSCAASGFTFSDYYMSWIRQAPGKGLEWVSYISSSGSTIYYADSVKGRFTISRDNAKNSLYLQMNSLRAEDTAVYYCASVHKKPIFDYWGQGTLVTVSSGGGGSGGGGSGGGGSGGAIQLTQSPSSLSASVGDRVTITCRASQGISSALAWYQQKPGKAPKLLIYDASSLESGVPSRFSGSGSGTDFTLTISSLQPEDFATYYCQQFNSYPLTFGGGTKVEIKTTTPAPRPPTPAPTIASQPLSLRPEACRPAAGGAVHTRGLDFACDFWVLVVVGGVLACYSLLVTVAFIIFWVRSKRSRLLHSDYMNMTPRRPGPTRKHYQPYAPPRDFAAYRSKRGRKKLLYIFKQPFMRPVQTTQEEDGCSCRFPEEEEGGCELRVKFSRSADAPAYKQGQNQLYNELNLGRREEYDVLDKRRGRDPEMGGKPRRKNPQEGLYNELQKDKMAEAYSEIGMKGERRRGKGHDGLYQGLSTATKDTYDALHMQALPPR

SEQ ID NO: 319 - protein, 509 aa, synthetic construct
  REGION 1..509: note = single chain variable fragment
QVQLVESGGGLVKPGGSLRLSCAASGFTFSDYYMSWIRQAPGKGLEWVSYISSSGSTIYYADSVKGRFTISRDNAKNSLYLQMNSLRAEDTAVYYCASTSRRCTFQHWGQGTLVTVSSGGGGSGGGGSGGGGSGGAIQLTQSPSSLSASVGDRVTITCRASQGISSALAWYQQKPGKAPKLLIYDASSLESGVPSRFSGSGSGTDFTLTISSLQPEDFATYYCQQFNSYPLTFGGGTKVEIKTTTPAPRPPTPAPTIASQPLSLRPEACRPAAGGAVHTRGLDFACDFWVLVVVGGVLACYSLLVTVAFIIFWVRSKRSRLLHSDYMNMTPRRPGPTRKHYQPYAPPRDFAAYRSKRGRKKLLYIFKQPFMRPVQTTQEEDGCSCRFPEEEEGGCELRVKFSRSADAPAYKQGQNQLYNELNLGRREEYDVLDKRRGRDPEMGGKPRRKNPQEGLYNELQKDKMAEAYSEIGMKGERRRGKGHDGLYQGLSTATKDTYDALHMQALPPR

SEQ ID NO: 320 - protein, 509 aa, synthetic construct
  REGION 1..509: note = single chain variable fragment
QVQLVESGGGLVKPGGSLRLSCAASGFTFSDYYMSWIRQAPGKGLEWVSYISSSGSTIYYADSVKGRFTISRDNAKNSLYLQMNSLRAEDTAVYYCASTSPRPLFQHWGQGTLVTVSSGGGGSGGGGSGGGGSGGAIQLTQSPSSLSASVGDRVTITCRASQGISSALAWYQQKPGKAPKLLIYDASSLESGVPSRFSGSGSGTDFTLTISSLQPEDFATYYCQQFNSYPLTFGGGTKVEIKTTTPAPRPPTPAPTIASQPLSLRPEACRPAAGGAVHTRGLDFACDFWVLVVVGGVLACYSLLVTVAFIIFWVRSKRSRLLHSDYMNMTPRRPGPTRKHYQPYAPPRDFAAYRSKRGRKKLLYIFKQPFMRPVQTTQEEDGCSCRFPEEEEGGCELRVKFSRSADAPAYKQGQNQLYNELNLGRREEYDVLDKRRGRDPEMGGKPRRKNPQEGLYNELQKDKMAEAYSEIGMKGERRRGKGHDGLYQGLSTATKDTYDALHMQALPPR

SEQ ID NO: 321 - protein, 511 aa, synthetic construct
  REGION 1..511: note = single chain variable fragment
QVQLVESGGGLVKPGGSLRLSCAASGFTFSDYYMSWIRQAPGKGLEWVSYISSSGSTIYYADSVKGRFTISRDNAKNSLYLQMNSLRAEDTAVYYCASPYQVRGVYFDYWGQGTLVTVSSGGGGSGGGGSGGGGSGGAIQLTQSPSSLSASVGDRVTITCRASQGISSALAWYQQKPGKAPKLLIYDASSLESGVPSRFSGSGSGTDFTLTISSLQPEDFATYYCQQFNSYPLTFGGGTKVEIKTTTPAPRPPTPAPTIASQPLSLRPEACRPAAGGAVHTRGLDFACDFWVLVVVGGVLACYSLLVTVAFIIFWVRSKRSRLLHSDYMNMTPRRPGPTRKHYQPYAPPRDFAAYRSKRGRKKLLYIFKQPFMRPVQTTQEEDGCSCRFPEEEEGGCELRVKFSRSADAPAYKQGQNQLYNELNLGRREEYDVLDKRRGRDPEMGGKPRRKNPQEGLYNELQKDKMAEAYSEIGMKGERRRGKGHDGLYQGLSTATKDTYDALHMQALPPR

SEQ ID NO: 322 - protein, 511 aa, synthetic construct
  REGION 1..511: note = single chain variable fragment
QVQLVESGGGLVKPGGSLRLSCAASGFTFSDYYMSWIRQAPGKGLEWVSYISSSGSTIYYADSVKGRFTISRDNAKNSLYLQMNSLRAEDTAVYYCASPYKKRRTVFDYWGQGTLVTVSSGGGGSGGGGSGGGGSGGAIQLTQSPSSLSASVGDRVTITCRASQGISSALAWYQQKPGKAPKLLIYDASSLESGVPSRFSGSGSGTDFTLTISSLQPEDFATYYCQQFNSYPLTFGGGTKVEIKTTTPAPRPPTPAPTIASQPLSLRPEACRPAAGGAVHTRGLDFACDFWVLVVVGGVLACYSLLVTVAFIIFWVRSKRSRLLHSDYMNMTPRRPGPTRKHYQPYAPPRDFAAYRSKRGRKKLLYIFKQPFMRPVQTTQEEDGCSCRFPEEEEGGCELRVKFSRSADAPAYKQGQNQLYNELNLGRREEYDVLDKRRGRDPEMGGKPRRKNPQEGLYNELQKDKMAEAYSEIGMKGERRRGKGHDGLYQGLSTATKDTYDALHMQALPPR

SEQ ID NO: 323 - protein, 510 aa, synthetic construct
  REGION 1..510: note = single chain variable fragment
QVQLVESGGGLVKPGGSLRLSCAASGFTFSDYYMSWIRQAPGKGLEWVSYISSSGSTIYYADSVKGRFTISRDNAKNSLYLQMNSLRAEDTAVYYCASLQRGLALFQHWGQGTLVTVSSGGGGSGGGGSGGGGSGGAIQLTQSPSSLSASVGDRVTITCRASQGISSALAWYQQKPGKAPKLLIYDASSLESGVPSRFSGSGSGTDFTLTISSLQPEDFATYYCQQFNSYPLTFGGGTKVEIKTTTPAPRPPTPAPTIASQPLSLRPEACRPAAGGAVHTRGLDFACDFWVLVVVGGVLACYSLLVTVAFIIFWVRSKRSRLLHSDYMNMTPRRPGPTRKHYQPYAPPRDFAAYRSKRGRKKLLYIFKQPFMRPVQTTQEEDGCSCRFPEEEEGGCELRVKFSRSADAPAYKQGQNQLYNELNLGRREEYDVLDKRRGRDPEMGGKPRRKNPQEGLYNELQKDKMAEAYSEIGMKGERRRGKGHDGLYQGLSTATKDTYDALHMQALPPR

SEQ ID NO: 324 - protein, 509 aa, synthetic construct
  REGION 1..509: note = single chain variable fragment
QVQLVESGGGLVKPGGSLRLSCAASGFTFSDYYMSWIRQAPGKGLEWVSYISSSGSTIYYADSVKGRFTISRDNAKNSLYLQMNSLRAEDTAVYYCASILSVPYFDLWGRGTLVTVSSGGGGSGGGGSGGGGSGGAIQLTQSPSSLSASVGDRVTITCRASQGISSALAWYQQKPGKAPKLLIYDASSLESGVPSRFSGSGSGTDFTLTISSLQPEDFATYYCQQFNSYPLTFGGGTKVEIKTTTPAPRPPTPAPTIASQPLSLRPEACRPAAGGAVHTRGLDFACDFWVLVVVGGVLACYSLLVTVAFIIFWVRSKRSRLLHSDYMNMTPRRPGPTRKHYQPYAPPRDFAAYRSKRGRKKLLYIFKQPFMRPVQTTQEEDGCSCRFPEEEEGGCELRVKFSRSADAPAYKQGQNQLYNELNLGRREEYDVLDKRRGRDPEMGGKPRRKNPQEGLYNELQKDKMAEAYSEIGMKGERRRGKGHDGLYQGLSTATKDTYDALHMQALPPR

SEQ ID NO: 325 - protein, 514 aa, synthetic construct
  REGION 1..514: note = single chain variable fragment
QVQLVESGGGLVKPGGSLRLSCAASGFTFSDYYMSWIRQAPGKGLEWVSYISSSGSTIYYADSVKGRFTISRDNAKNSLYLQMNSLRAEDTAVYYCASGWIRVPLRLPLFQHWGQGTLVTVSSGGGGSGGGGSGGGGSGGAIQLTQSPSSLSASVGDRVTITCRASQGISSALAWYQQKPGKAPKLLIYDASSLESGVPSRFSGSGSGTDFTLTISSLQPEDFATYYCQQFNSYPLTFGGGTKVEIKTTTPAPRPPTPAPTIASQPLSLRPEACRPAAGGAVHTRGLDFACDFWVLVVVGGVLACYSLLVTVAFIIFWVRSKRSRLLHSDYMNMTPRRPGPTRKHYQPYAPPRDFAAYRSKRGRKKLLYIFKQPFMRPVQTTQEEDGCSCRFPEEEEGGCELRVKFSRSADAPAYKQGQNQLYNELNLGRREEYDVLDKRRGRDPEMGGKPRRKNPQEGLYNELQKDKMAEAYSEIGMKGERRRGKGHDGLYQGLSTATKDTYDALHMQALPPR

SEQ ID NO: 326 - protein, 509 aa, synthetic construct
  REGION 1..509: note = single chain variable fragment
QVQLVESGGGLVKPGGSLRLSCAASGFTFSDYYMSWIRQAPGKGLEWVSYISSSGSTIYYADSVKGRFTISRDNAKNSLYLQMNSLRAEDTAVYYCARVTIFAIFDIWGQGTMVTVSSGGGGSGGGGSGGGGSGGAIQLTQSPSSLSASVGDRVTITCRASQGISSALAWYQQKPGKAPKLLIYDASSLESGVPSRFSGSGSGTDFTLTISSLQPEDFATYYCQQFNSYPLTFGGGTKVEIKTTTPAPRPPTPAPTIASQPLSLRPEACRPAAGGAVHTRGLDFACDFWVLVVVGGVLACYSLLVTVAFIIFWVRSKRSRLLHSDYMNMTPRRPGPTRKHYQPYAPPRDFAAYRSKRGRKKLLYIFKQPFMRPVQTTQEEDGCSCRFPEEEEGGCELRVKFSRSADAPAYKQGQNQLYNELNLGRREEYDVLDKRRGRDPEMGGKPRRKNPQEGLYNELQKDKMAEAYSEIGMKGERRRGKGHDGLYQGLSTATKDTYDALHMQALPPR

SEQ ID NO: 327 - protein, 510 aa, synthetic construct
  REGION 1..510: note = single chain variable fragment
QVQLVESGGGLVKPGGSLRLSCAASGFTFSDYYMSWIRQAPGKGLEWVSYISSSGSTIYYADSVKGRFTISRDNAKNSLYLQMNSLRAEDTAVYYCARVGRGFVHFDLWGRGTLVTVSSGGGGSGGGGSGGGGSGGAIQLTQSPSSLSASVGDRVTITCRASQGISSALAWYQQKPGKAPKLLIYDASSLESGVPSRFSGSGSGTDFTLTISSLQPEDFATYYCQQFNSYPLTFGGGTKVEIKTTTPAPRPPTPAPTIASQPLSLRPEACRPAAGGAVHTRGLDFACDFWVLVVVGGVLACYSLLVTVAFIIFWVRSKRSRLLHSDYMNMTPRRPGPTRKHYQPYAPPRDFAAYRSKRGRKKLLYIFKQPFMRPVQTTQEEDGCSCRFPEEEEGGCELRVKFSRSADAPAYKQGQNQLYNELNLGRREEYDVLDKRRGRDPEMGGKPRRKNPQEGLYNELQKDKMAEAYSEIGMKGERRRGKGHDGLYQGLSTATKDTYDALHMQALPPR

SEQ ID NO: 328 - protein, 511 aa, synthetic construct
  REGION 1..511: note = single chain variable fragment
QVQLVESGGGLVKPGGSLRLSCAASGFTFSDYYMSWIRQAPGKGLEWVSYISSSGSTIYYADSVKGRFTISRDNAKNSLYLQMNSLRAEDTAVYYCARTSRGLCVLFDYWGQGTLVTVSSGGGGSGGGGSGGGGSGGAIQLTQSPSSLSASVGDRVTITCRASQGISSALAWYQQKPGKAPKLLIYDASSLESGVPSRFSGSGSGTDFTLTISSLQPEDFATYYCQQFNSYPLTFGGGTKVEIKTTTPAPRPPTPAPTIASQPLSLRPEACRPAAGGAVHTRGLDFACDFWVLVVVGGVLACYSLLVTVAFIIFWVRSKRSRLLHSDYMNMTPRRPGPTRKHYQPYAPPRDFAAYRSKRGRKKLLYIFKQPFMRPVQTTQEEDGCSCRFPEEEEGGCELRVKFSRSADAPAYKQGQNQLYNELNLGRREEYDVLDKRRGRDPEMGGKPRRKNPQEGLYNELQKDKMAEAYSEIGMKGERRRGKGHDGLYQGLSTATKDTYDALHMQALPPR

SEQ ID NO: 329 - protein, 511 aa, synthetic construct
  REGION 1..511: note = single chain variable fragment
QVQLVESGGGLVKPGGSLRLSCAASGFTFSDYYMSWIRQAPGKGLEWVSYISSSGSTIYYADSVKGRFTISRDNAKNSLYLQMNSLRAEDTAVYYCARSGPSSYWYFDLWGRGTLVTVSSGGGGSGGGGSGGGGSGGAIQLTQSPSSLSASVGDRVTITCRASQGISSALAWYQQKPGKAPKLLIYDASSLESGVPSRFSGSGSGTDFTLTISSLQPEDFATYYCQQFNSYPLTFGGGTKVEIKTTTPAPRPPTPAPTIASQPLSLRPEACRPAAGGAVHTRGLDFACDFWVLVVVGGVLACYSLLVTVAFIIFWVRSKRSRLLHSDYMNMTPRRPGPTRKHYQPYAPPRDFAAYRSKRGRKKLLYIFKQPFMRPVQTTQEEDGCSCRFPEEEEGGCELRVKFSRSADAPAYKQGQNQLYNELNLGRREEYDVLDKRRGRDPEMGGKPRRKNPQEGLYNELQKDKMAEAYSEIGMKGERRRGKGHDGLYQGLSTATKDTYDALHMQALPPR

SEQ ID NO: 330 - protein, 511 aa, synthetic construct
  REGION 1..511: note = single chain variable fragment
QVQLVESGGGLVKPGGSLRLSCAASGFTFSDYYMSWIRQAPGKGLEWVSYISSSGSTIYYADSVKGRFTISRDNAKNSLYLQMNSLRAEDTAVYYCARNIYMGGIWFDPWGQGTLVTVSSGGGGSGGGGSGGGGSGGAIQLTQSPSSLSASVGDRVTITCRASQGISSALAWYQQKPGKAPKLLIYDASSLESGVPSRFSGSGSGTDFTLTISSLQPEDFATYYCQQFNSYPLTFGGGTKVEIKTTTPAPRPPTPAPTIASQPLSLRPEACRPAAGGAVHTRGLDFACDFWVLVVVGGVLACYSLLVTVAFIIFWVRSKRSRLLHSDYMNMTPRRPGPTRKHYQPYAPPRDFAAYRSKRGRKKLLYIFKQPFMRPVQTTQEEDGCSCRFPEEEEGGCELRVKFSRSADAPAYKQGQNQLYNELNLGRREEYDVLDKRRGRDPEMGGKPRRKNPQEGLYNELQKDKMAEAYSEIGMKGERRRGKGHDGLYQGLSTATKDTYDALHMQALPPR

SEQ ID NO: 331 - protein, 510 aa, synthetic construct
  REGION 1..510: note = single chain variable fragment
QVQLVESGGGLVKPGGSLRLSCAASGFTFSDYYMSWIRQAPGKGLEWVSYISSSGSTIYYADSVKGRFTISRDNAKNSLYLQMNSLRAEDTAVYYCARLTVRTGAFDIWGQGTMVTVSSGGGGSGGGGSGGGGSGGAIQLTQSPSSLSASVGDRVTITCRASQGISSALAWYQQKPGKAPKLLIYDASSLESGVPSRFSGSGSGTDFTLTISSLQPEDFATYYCQQFNSYPLTFGGGTKVEIKTTTPAPRPPTPAPTIASQPLSLRPEACRPAAGGAVHTRGLDFACDFWVLVVVGGVLACYSLLVTVAFIIFWVRSKRSRLLHSDYMNMTPRRPGPTRKHYQPYAPPRDFAAYRSKRGRKKLLYIFKQPFMRPVQTTQEEDGCSCRFPEEEEGGCELRVKFSRSADAPAYKQGQNQLYNELNLGRREEYDVLDKRRGRDPEMGGKPRRKNPQEGLYNELQKDKMAEAYSEIGMKGERRRGKGHDGLYQGLSTATKDTYDALHMQALPPR

SEQ ID NO: 332 - protein, 510 aa, synthetic construct
  REGION 1..510: note = single chain variable fragment
QVQLVESGGGLVKPGGSLRLSCAASGFTFSDYYMSWIRQAPGKGLEWVSYISSSGSTIYYADSVKGRFTISRDNAKNSLYLQMNSLRAEDTAVYYCARLRTAHLDFDLWGRGTLVTVSSGGGGSGGGGSGGGGSGGAIQLTQSPSSLSASVGDRVTITCRASQGISSALAWYQQKPGKAPKLLIYDASSLESGVPSRFSGSGSGTDFTLTISSLQPEDFATYYCQQFNSYPLTFGGGTKVEIKTTTPAPRPPTPAPTIASQPLSLRPEACRPAAGGAVHTRGLDFACDFWVLVVVGGVLACYSLLVTVAFIIFWVRSKRSRLLHSDYMNMTPRRPGPTRKHYQPYAPPRDFAAYRSKRGRKKLLYIFKQPFMRPVQTTQEEDGCSCRFPEEEEGGCELRVKFSRSADAPAYKQGQNQLYNELNLGRREEYDVLDKRRGRDPEMGGKPRRKNPQEGLYNELQKDKMAEAYSEIGMKGERRRGKGHDGLYQGLSTATKDTYDALHMQALPPR

SEQ ID NO: 333 - protein, 510 aa, synthetic construct
  REGION 1..510: note = single chain variable fragment
QVQLVESGGGLVKPGGSLRLSCAASGFTFSDYYMSWIRQAPGKGLEWVSYISSSGSTIYYADSVKGRFTISRDNAKNSLYLQMNSLRAEDTAVYYCARDLIFPVVFDYWGQGTLVTVSSGGGGSGGGGSGGGGSGGAIQLTQSPSSLSASVGDRVTITCRASQGISSALAWYQQKPGKAPKLLIYDASSLESGVPSRFSGSGSGTDFTLTISSLQPEDFATYYCQQFNSYPLTFGGGTKVEIKTTTPAPRPPTPAPTIASQPLSLRPEACRPAAGGAVHTRGLDFACDFWVLVVVGGVLACYSLLVTVAFIIFWVRSKRSRLLHSDYMNMTPRRPGPTRKHYQPYAPPRDFAAYRSKRGRKKLLYIFKQPFMRPVQTTQEEDGCSCRFPEEEEGGCELRVKFSRSADAPAYKQGQNQLYNELNLGRREEYDVLDKRRGRDPEMGGKPRRKNPQEGLYNELQKDKMAEAYSEIGMKGERRRGKGHDGLYQGLSTATKDTYDALHMQALPPR

SEQ ID NO: 334 - protein, 513 aa, synthetic construct
  REGION 1..513: note = single chain variable fragment
QVQLVESGGGLVKPGGSLRLSCAASGFTFSDYYMSWIRQAPGKGLEWVSYISSSGSTIYYADSVKGRFTISRDNAKNSLYLQMNSLRAEDTAVYYCARDGYRKYGYVFFDIWGQGTMVTVSSGGGGSGGGGSGGGGSGGAIQLTQSPSSLSASVGDRVTITCRASQGISSALAWYQQKPGKAPKLLIYDASSLESGVPSRFSGSGSGTDFTLTISSLQPEDFATYYCQQFNSYPLTFGGGTKVEIKTTTPAPRPPTPAPTIASQPLSLRPEACRPAAGGAVHTRGLDFACDFWVLVVVGGVLACYSLLVTVAFIIFWVRSKRSRLLHSDYMNMTPRRPGPTRKHYQPYAPPRDFAAYRSKRGRKKLLYIFKQPFMRPVQTTQEEDGCSCRFPEEEEGGCELRVKFSRSADAPAYKQGQNQLYNELNLGRREEYDVLDKRRGRDPEMGGKPRRKNPQEGLYNELQKDKMAEAYSEIGMKGERRRGKGHDGLYQGLSTATKDTYDALHMQALPPR

SEQ ID NO: 335 - protein, 513 aa, synthetic construct
  REGION 1..513: note = single chain variable fragment
QVQLVESGGGLVKPGGSLRLSCAASGFTFSDYYMSWIRQAPGKGLEWVSYISSSGSTIYYADSVKGRFTISRDNAKNSLYLQMNSLRAEDTAVYYCARDGRYRRFWHAFDIWGQGTMVTVSSGGGGSGGGGSGGGGSGGAIQLTQSPSSLSASVGDRVTITCRASQGISSALAWYQQKPGKAPKLLIYDASSLESGVPSRFSGSGSGTDFTLTISSLQPEDFATYYCQQFNSYPLTFGGGTKVEIKTTTPAPRPPTPAPTIASQPLSLRPEACRPAAGGAVHTRGLDFACDFWVLVVVGGVLACYSLLVTVAFIIFWVRSKRSRLLHSDYMNMTPRRPGPTRKHYQPYAPPRDFAAYRSKRGRKKLLYIFKQPFMRPVQTTQEEDGCSCRFPEEEEGGCELRVKFSRSADAPAYKQGQNQLYNELNLGRREEYDVLDKRRGRDPEMGGKPRRKNPQEGLYNELQKDKMAEAYSEIGMKGERRRGKGHDGLYQGLSTATKDTYDALHMQALPPR

SEQ ID NO: 336 - protein, 509 aa, synthetic construct
  REGION 1..509: note = single chain variable fragment
QVQLVESGGGLVKPGGSLRLSCAASGFTFSDYYMSWIRQAPGKGLEWVSYISSSGSTIYYADSVKGRFTISRDNAKNSLYLQMNSLRAEDTAVYYCARAHIRGYFDLWGRGTLVTVSSGGGGSGGGGSGGGGSGGAIQLTQSPSSLSASVGDRVTITCRASQGISSALAWYQQKPGKAPKLLIYDASSLESGVPSRFSGSGSGTDFTLTISSLQPEDFATYYCQQFNSYPLTFGGGTKVEIKTTTPAPRPPTPAPTIASQPLSLRPEACRPAAGGAVHTRGLDFACDFWVLVVVGGVLACYSLLVTVAFIIFWVRSKRSRLLHSDYMNMTPRRPGPTRKHYQPYAPPRDFAAYRSKRGRKKLLYIFKQPFMRPVQTTQEEDGCSCRFPEEEEGGCELRVKFSRSADAPAYKQGQNQLYNELNLGRREEYDVLDKRRGRDPEMGGKPRRKNPQEGLYNELQKDKMAEAYSEIGMKGERRRGKGHDGLYQGLSTATKDTYDALHMQALPPR

SEQ ID NO: 337 - protein, 512 aa, synthetic construct
  REGION 1..512: note = single chain variable fragment
EVQLLESGGGLVQPGGSLRLSCAASGFTFSSYAMSWVRQAPGKGLEWVSAISGSGGSTYYADSVKGRFTISRDNSKNTLYLQMNSLRAEDTAVYYCATWMGGGGRWYFDLWGRGTLVTVSSGGGGSGGGGSGGGGSGGAIQLTQSPSSLSASVGDRVTITCRASQGISSALAWYQQKPGKAPKLLIYDASSLESGVPSRFSGSGSGTDFTLTISSLQPEDFATYYCQQFNNYPLTFGGGTKVEIKTTTPAPRPPTPAPTIASQPLSLRPEACRPAAGGAVHTRGLDFACDFWVLVVVGGVLACYSLLVTVAFIIFWVRSKRSRLLHSDYMNMTPRRPGPTRKHYQPYAPPRDFAAYRSKRGRKKLLYIFKQPFMRPVQTTQEEDGCSCRFPEEEEGGCELRVKFSRSADAPAYKQGQNQLYNELNLGRREEYDVLDKRRGRDPEMGGKPRRKNPQEGLYNELQKDKMAEAYSEIGMKGERRRGKGHDGLYQGLSTATKDTYDALHMQALPPR

SEQ ID NO: 338 - protein, 510 aa, synthetic construct
  REGION 1..510: note = single chain variable fragment
EVQLLESGGGLVQPGGSLRLSCAASGFTFSSYAMSWVRQAPGKGLEWVSAISGSGGSTYYADSVKGRFTISRDNSKNTLYLQMNSLRAEDTAVYYCARTSRTTWYFDLWGRGTLVTVSSGGGGSGGGGSGGGGSGGAIQLTQSPSSLSASVGDRVTITCRASQGISSALAWYQQKPGKAPKLLIYDASSLESGVPSRFSGSGSGTDFTLTISSLQPEDFATYYCQQFNNYPLTFGGGTKVEIKTTTPAPRPPTPAPTIASQPLSLRPEACRPAAGGAVHTRGLDFACDFWVLVVVGGVLACYSLLVTVAFIIFWVRSKRSRLLHSDYMNMTPRRPGPTRKHYQPYAPPRDFAAYRSKRGRKKLLYIFKQPFMRPVQTTQEEDGCSCRFPEEEEGGCELRVKFSRSADAPAYKQGQNQLYNELNLGRREEYDVLDKRRGRDPEMGGKPRRKNPQEGLYNELQKDKMAEAYSEIGMKGERRRGKGHDGLYQGLSTATKDTYDALHMQALPPR

SEQ ID NO: 339 - protein, 512 aa, synthetic construct
  REGION 1..512: note = single chain variable fragment
EVQLLESGGGLVQPGGSLRLSCAASGFTFSSYAMSWVRQAPGKGLEWVSAISGSGGSTYYADSVKGRFTISRDNSKNTLYLQMNSLRAEDTAVYYCAKWMGGGGRLYFDLWGRGTLVTVSSGGGGSGGGGSGGGGSGGAIQLTQSPSSLSASVGDRVTITCRASQGISSALAWYQQKPGKAPKLLIYDASSLESGVPSRFSGSGSGTDFTLTISSLQPEDFATYYCQQFNNYPLTFGGGTKVEIKTTTPAPRPPTPAPTIASQPLSLRPEACRPAAGGAVHTRGLDFACDFWVLVVVGGVLACYSLLVTVAFIIFWVRSKRSRLLHSDYMNMTPRRPGPTRKHYQPYAPPRDFAAYRSKRGRKKLLYIFKQPFMRPVQTTQEEDGCSCRFPEEEEGGCELRVKFSRSADAPAYKQGQNQLYNELNLGRREEYDVLDKRRGRDPEMGGKPRRKNPQEGLYNELQKDKMAEAYSEIGMKGERRRGKGHDGLYQGLSTATKDTYDALHMQALPPR

SEQ ID NO: 340 - protein, 511 aa, synthetic construct
  REGION 1..511: note = single chain variable fragment
EVQLLESGGGLVQPGGSLRLSCAASGFTFSSYAMSWVRQAPGKGLEWVSAISGSGGSTYYADSVKGRFTISRDNSKNTLYLQMNSLRAEDTAVYYCAKWGGRLYWYFDLWGRGTLVTVSSGGGGSGGGGSGGGGSGGAIQLTQSPSSLSASVGDRVTITCRASQGISSALAWYQQKPGKAPKLLIYDASSLESGVPSRFSGSGSGTDFTLTISSLQPEDFATYYCQQFNNYPLTFGGGTKVEIKTTTPAPRPPTPAPTIASQPLSLRPEACRPAAGGAVHTRGLDFACDFWVLVVVGGVLACYSLLVTVAFIIFWVRSKRSRLLHSDYMNMTPRRPGPTRKHYQPYAPPRDFAAYRSKRGRKKLLYIFKQPFMRPVQTTQEEDGCSCRFPEEEEGGCELRVKFSRSADAPAYKQGQNQLYNELNLGRREEYDVLDKRRGRDPEMGGKPRRKNPQEGLYNELQKDKMAEAYSEIGMKGERRRGKGHDGLYQGLSTATKDTYDALHMQALPPR

SEQ ID NO: 341 - protein, 510 aa, synthetic construct
  REGION 1..510: note = single chain variable fragment
EVQLLESGGGLVQPGGSLRLSCAASGFTFSSYAMSWVRQAPGKGLEWVSAISGSGGSTYYADSVKGRFTISRDNSKNTLYLQMNSLRAEDTAVYYCAKVIRQLWYFDLWGRGTLVTVSSGGGGSGGGGSGGGGSGGAIQLTQSPSSLSASVGDRVTITCRASQGISSALAWYQQKPGKAPKLLIYDASSLESGVPSRFSGSGSGTDFTLTISSLQPEDFATYYCQQFNNYPLTFGGGTKVEIKTTTPAPRPPTPAPTIASQPLSLRPEACRPAAGGAVHTRGLDFACDFWVLVVVGGVLACYSLLVTVAFIIFWVRSKRSRLLHSDYMNMTPRRPGPTRKHYQPYAPPRDFAAYRSKRGRKKLLYIFKQPFMRPVQTTQEEDGCSCRFPEEEEGGCELRVKFSRSADAPAYKQGQNQLYNELNLGRREEYDVLDKRRGRDPEMGGKPRRKNPQEGLYNELQKDKMAEAYSEIGMKGERRRGKGHDGLYQGLSTATKDTYDALHMQALPPR

SEQ ID NO: 342 - protein, 510 aa, synthetic construct
  REGION 1..510: note = single chain variable fragment
EVQLLESGGGLVQPGGSLRLSCAASGFTFSSYAMSWVRQAPGKGLEWVSAISGSGGSTYYADSVKGRFTISRDNSKNTLYLQMNSLRAEDTAVYYCAKVFANSWYFDLWGRGTLVTVSSGGGGSGGGGSGGGGSGGAIQLTQSPSSLSASVGDRVTITCRASQGISSALAWYQQKPGKAPKLLIYDASSLESGVPSRFSGSGSGTDFTLTISSLQPEDFATYYCQQFNNYPLTFGGGTKVEIKTTTPAPRPPTPAPTIASQPLSLRPEACRPAAGGAVHTRGLDFACDFWVLVVVGGVLACYSLLVTVAFIIFWVRSKRSRLLHSDYMNMTPRRPGPTRKHYQPYAPPRDFAAYRSKRGRKKLLYIFKQPFMRPVQTTQEEDGCSCRFPEEEEGGCELRVKFSRSADAPAYKQGQNQLYNELNLGRREEYDVLDKRRGRDPEMGGKPRRKNPQEGLYNELQKDKMAEAYSEIGMKGERRRGKGHDGLYQGLSTATKDTYDALHMQALPPR

SEQ ID NO: 343 - protein, 510 aa, synthetic construct
  REGION 1..510: note = single chain variable fragment
EVQLLESGGGLVQPGGSLRLSCAASGFTFSSYAMSWVRQAPGKGLEWVSAISGSGGSTYYADSVKGRFTISRDNSKNTLYLQMNSLRAEDTAVYYCAKVDRTTWYFDLWGRGTLVTVSSGGGGSGGGGSGGGGSGGAIQLTQSPSSLSASVGDRVTITCRASQGISSALAWYQQKPGKAPKLLIYDASSLESGVPSRFSGSGSGTDFTLTISSLQPEDFATYYCQQFNNYPLTFGGGTKVEIKTTTPAPRPPTPAPTIASQPLSLRPEACRPAAGGAVHTRGLDFACDFWVLVVVGGVLACYSLLVTVAFIIFWVRSKRSRLLHSDYMNMTPRRPGPTRKHYQPYAPPRDFAAYRSKRGRKKLLYIFKQPFMRPVQTTQEEDGCSCRFPEEEEGGCELRVKFSRSADAPAYKQGQNQLYNELNLGRREEYDVLDKRRGRDPEMGGKPRRKNPQEGLYNELQKDKMAEAYSEIGMKGERRRGKGHDGLYQGLSTATKDTYDALHMQALPPR

SEQ ID NO: 344 - protein, 513 aa, synthetic construct
  REGION 1..513: note = single chain variable fragment
EVQLLESGGGLVQPGGSLRLSCAASGFTFSSYAMSWVRQAPGKGLEWVSAISGSGGSTYYADSVKGRFTISRDNSKNTLYLQMNSLRAEDTAVYYCAKRWGKDGPYWYFDLWGRGTLVTVSSGGGGSGGGGSGGGGSGGAIQLTQSPSSLSASVGDRVTITCRASQGISSALAWYQQKPGKAPKLLIYDASSLESGVPSRFSGSGSGTDFTLTISSLQPEDFATYYCQQFNNYPLTFGGGTKVEIKTTTPAPRPPTPAPTIASQPLSLRPEACRPAAGGAVHTRGLDFACDFWVLVVVGGVLACYSLLVTVAFIIFWVRSKRSRLLHSDYMNMTPRRPGPTRKHYQPYAPPRDFAAYRSKRGRKKLLYIFKQPFMRPVQTTQEEDGCSCRFPEEEEGGCELRVKFSRSADAPAYKQGQNQLYNELNLGRREEYDVLDKRRGRDPEMGGKPRRKNPQEGLYNELQKDKMAEAYSEIGMKGERRRGKGHDGLYQGLSTATKDTYDALHMQALPPR

SEQ ID NO: 345 - protein, 513 aa, synthetic construct
  REGION 1..513: note = single chain variable fragment
EVQLLESGGGLVQPGGSLRLSCAASGFTFSSYAMSWVRQAPGKGLEWVSAISGSGGSTYYADSVKGRFTISRDNSKNTLYLQMNSLRAEDTAVYYCAKRRDSYGPYWYFDLWGRGTLVTVSSGGGGSGGGGSGGGGSGGAIQLTQSPSSLSASVGDRVTITCRASQGISSALAWYQQKPGKAPKLLIYDASSLESGVPSRFSGSGSGTDFTLTISSLQPEDFATYYCQQFNNYPLTFGGGTKVEIKTTTPAPRPPTPAPTIASQPLSLRPEACRPAAGGAVHTRGLDFACDFWVLVVVGGVLACYSLLVTVAFIIFWVRSKRSRLLHSDYMNMTPRRPGPTRKHYQPYAPPRDFAAYRSKRGRKKLLYIFKQPFMRPVQTTQEEDGCSCRFPEEEEGGCELRVKFSRSADAPAYKQGQNQLYNELNLGRREEYDVLDKRRGRDPEMGGKPRRKNPQEGLYNELQKDKMAEAYSEIGMKGERRRGKGHDGLYQGLSTATKDTYDALHMQALPPR

SEQ ID NO: 346 - protein, 512 aa, synthetic construct
  REGION 1..512: note = single chain variable fragment
EVQLLESGGGLVQPGGSLRLSCAASGFTFSSYAMSWVRQAPGKGLEWVSAISGSGGSTYYADSVKGRFTISRDNSKNTLYLQMNSLRAEDTAVYYCAKNRPPPGYWYFDLWGRGTLVTVSSGGGGSGGGGSGGGGSGGAIQLTQSPSSLSASVGDRVTITCRASQGISSALAWYQQKPGKAPKLLIYDASSLESGVPSRFSGSGSGTDFTLTISSLQPEDFATYYCQQFNNYPLTFGGGTKVEIKTTTPAPRPPTPAPTIASQPLSLRPEACRPAAGGAVHTRGLDFACDFWVLVVVGGVLACYSLLVTVAFIIFWVRSKRSRLLHSDYMNMTPRRPGPTRKHYQPYAPPRDFAAYRSKRGRKKLLYIFKQPFMRPVQTTQEEDGCSCRFPEEEEGGCELRVKFSRSADAPAYKQGQNQLYNELNLGRREEYDVLDKRRGRDPEMGGKPRRKNPQEGLYNELQKDKMAEAYSEIGMKGERRRGKGHDGLYQGLSTATKDTYDALHMQALPPR

SEQ ID NO: 347 - protein, 510 aa, synthetic construct
  REGION 1..510: note = single chain variable fragment
EVQLLESGGGLVQPGGSLRLSCAASGFTFSSYAMSWVRQAPGKGLEWVSAISGSGGSTYYADSVKGRFTISRDNSKNTLYLQMNSLRAEDTAVYYCAKGRRFSWYFDLWGRGTLVTVSSGGGGSGGGGSGGGGSGGAIQLTQSPSSLSASVGDRVTITCRASQGISSALAWYQQKPGKAPKLLIYDASSLESGVPSRFSGSGSGTDFTLTISSLQPEDFATYYCQQFNNYPLTFGGGTKVEIKTTTPAPRPPTPAPTIASQPLSLRPEACRPAAGGAVHTRGLDFACDFWVLVVVGGVLACYSLLVTVAFIIFWVRSKRSRLLHSDYMNMTPRRPGPTRKHYQPYAPPRDFAAYRSKRGRKKLLYIFKQPFMRPVQTTQEEDGCSCRFPEEEEGGCELRVKFSRSADAPAYKQGQNQLYNELNLGRREEYDVLDKRRGRDPEMGGKPRRKNPQEGLYNELQKDKMAEAYSEIGMKGERRRGKGHDGLYQGLSTATKDTYDALHMQALPPR

SEQ ID NO: 348 - protein, 500 aa, unidentified
  REGION 1..500: note = inhibitory receptor
DVLMTQTPLSLPVSLGDQASISCRSSQSIVHSNGNTYLEWYLQKPGQSPKLLIYKVSNRFSGVPDRFSGSGSGTDFTLKISRVEAEDLGVYYCFQGSHVPRTSGGGTKLEIKGGGGSGGGGSGGGGSGGQVQLQQSGPELVKPGASVRISCKASGYTFTSYHIHWVKQRPGQGLEWIGWIYPGNVNTEYNEKFKGKATLTADKSSSTAYMHLSSLTSEDSAVYFCAREEITYAMDYWGQGTSVTVSSYGSQSSKPYLLTHPSDPLELVVSGPSGGPSSPTTGPTSTSGPEDQPLTPTGSDPQSGLGRHLGVVIGILVAVILLLLLLLLLFLILRHRRQGKHWTSTQRKADFQHPAGAVGPEPTDRGLQWRSSPAADAQEENLYAAVKHTQPEDGVEMDTRSPHDEDPQAVTYAEVKHSRPRREMASPPSPLSGEFLDTKDRQAEEDRQMDTEAAASEAPQDVTYAQLHSLTLRREATEPPPSQEGPSPAVPSIYATLAIH

SEQ ID NO: 349 - DNA, 46 bp, synthetic construct
  misc_feature 1..46: note = B2M shRNA
  source 1..46: mol_type = other DNA
gcactcaaagcttgttaagatcgaaatcttaacaagctttgagtgc

SEQ ID NO: 350 - DNA, 46 bp, synthetic construct
  misc_feature 1..46: note = B2M shRNA
  source 1..46: mol_type = other DNA
gttaacttccaatttacataccgaagtatgtaaattggaagttaac

SEQ ID NO: 351 - protein, 21 aa, unidentified
  REGION 1..21: note = T2A self-cleaving polypeptide
GSGEGRGSLLTCGDVEENPGP

SEQ ID NO: 352 - protein, 64 aa, unidentified; identical to SEQ ID NO: 81
  REGION 1..64: note = HLA-A*02 scFv LIR-1 inhibitory receptor

SEQ ID NO: 353 - protein, 64 aa, unidentified; identical to SEQ ID NO: 81
  REGION 1..64: note = HLA-A*02 scFv LIR-1 inhibitory receptor

SEQ ID NO: 354 - protein, 44 aa, unidentified; identical to SEQ ID NO: 82
  REGION 1..44: note = HLA-A*02 scFv LIR-1 inhibitory receptor

SEQ ID NO: 355 - protein, 64 aa, unidentified; identical to SEQ ID NO: 81
  REGION 1..64: note = HLA-A*02 scFv LIR-1 inhibitory receptor

SEQ ID NO: 356 - protein, 44 aa, unidentified; identical to SEQ ID NO: 82
  REGION 1..44: note = HLA-A*02 scFv LIR-1 inhibitory receptor

SEQ ID NO: 357 - protein, 71 aa, unidentified
  REGION 1..71: note = HLA-A*02 scFv LIR-1 inhibitory receptor
SSYGSQSSKPYLLTHPSDPLELVVSGPSGGPSSPTTGPTSTSGPEDQPLTPTGSDPQSGLGRHLGVVIGIL

SEQ ID NO: 358 - protein, 39 aa, unidentified
  REGION 1..39: note = HLA-A*02 scFv LIR-1 inhibitory receptor
SSTTGPTSTSGPEDQPLTPTGSDPQSGLGRHLGVVIGIL

SEQ ID NO: 359 - protein, 74 aa, unidentified
  REGION 1..74: note = HLA-A*02 scFv LIR-1 inhibitory receptor
SSAGSGGSGGSGGSPVPSTPPTPSPSTPPTPSPSGGSGNSSGSGGSPVPSTPPTPSPSTPPTPSPSASVVIGIL

SEQ ID NO: 360 - protein, 82 aa, unidentified
  REGION 1..82: note = HLA-A*02 scFv LIR-1 inhibitory receptor
SSAGSGGSGGSGGSPVPSTPPTNSSSTPPTPSPSPVPSTPPTNSSSTPPTPSPSPVPSTPPTNSSSTPPTPSPSASVVIGIL

SEQ ID NO: 361 - protein, 92 aa, unidentified
  REGION 1..92: note = HLA-A*02 scFv LIR-1 inhibitory receptor
SSVVSGPSGGPSSPTTGPTSTSGPEDQPLTPTGSDPQSGLGRHVVSGPSGGPSSPTTGPTSTSGPEDQPLTPTGSDPQSGLGRHLGVVIGIL

SEQ ID NO: 362 - protein, 22 aa, unidentified
  REGION 1..22: note = signal sequence
MDMRVPAQLLGLLLLWLRGARC

SEQ ID NO: 363 - DNA, 711 bp, synthetic construct
  misc_feature 1..711: note = MSLN scFv domain
  source 1..711: mol_type = other DNA
caggtgcagctggtgcagtctggggctgaggtggagaagcctggggcctcagtgaaggtctcctgcaaggcttctggatacaccttcaccgactactatatgcactgggtgcgacaggcccctggacaagggcttgagtggatgggatggatcaaccctaacagtggtggcacaaactatgcacagaagtttcagggcagggtcaccatgaccagggacacgtccatcagcacagcctacatggagctgagcaggctgagatctgacgacacggccgtgtattactgtgcgtctggctgggactttgactactggggccagggaaccctggtcaccgtgtcctcaggcggaggtggaagcggagggggaggatctggcggcggaggaagcggaggcgacatcgtgatgacccagtcttcctccctgtctgcatctgtcggagacagagtcaccatcacttgccgggccagtcagagcattaggtactatttaagttggtatcagcagaaaccaggaaaagcccctaagctcctgatctatactgcatccattttacaaaatggggtcccatcaaggttcagtggcagtggatctgggacagatttcactctcaccatcagcagcctgcaacctgaggattttgcaacttattactgcctccagacttacactactccggactttggcccagggaccaaggtggaaatcaaa

SEQ ID NO: 364 - DNA, 738 bp, synthetic construct
  misc_feature 1..738: note = MSLN scFv domain
  source 1..738: mol_type = other DNA
caggtgcagctggtgcagtctggggctgaggtgagggcacctggggcctcagtgaagatttcctgcaaggcttctggattcaccttcagaggctactatatccactgggtgcgacaggcccctggacaagggcttgagtggatgggaatcatcaaccctagtggtggtagcagagcctacgcacagaagttccagggcagggtcaccatgaccagggacacttccacgagcacagtctacatggagctgagcagcctgagatctgacgacacggccatgtattactgtgcgagaaccgcaagttgtggtggtgactgctactaccttgactactggggccagggaaccctggtcaccgtgtcctcaggcggaggtggaagcggagggggaggatctggcggcggaggaagcggaggcgacatccagatgacccagtctcctcccaccctgtctgcatctgtaggagacagagtcaccatcacttgccgggccagtgagaatgttaatatctggttggcctggtatcagcagaaaccagggaaagcccctaagctcctgatctataagtcatccagtttagcaagtggggtcccatcaaggttcagtggcagtggatctggggcagaattcactctcaccatcagcagcctgcagcctgatgattttgcaacttattactgccaacagtatcaaagttaccccctcactttcggcggagggaccaaggtggaaatcaaa

SEQ ID NO: 365 - DNA, 726 bp, synthetic construct
  misc_feature 1..726: note = MSLN scFv domain
  source 1..726: mol_type = other DNA
caggtgcagctggtgcagtctggggctgaggtgaagaagcctggggcctcagtgaaggtttcctgcaaggcttctggatactcattcaccggctacaccatgaactgggtgaggcaggcccctggacaaagacttgagtggatgggacttatcaccccttacaatggtgcttctagctacaaccagaagttcaggggcagggtcacaatcactagagacacgtcagccagcacagcctacatggagctctccagcctgagatctgaagacactgcagtctattactgtgcaagggggggttacgacgggaggggttttgactactggggccagggaaccacggtcaccgtgtcctcaggcggaggtggaagcggagggggaggatctggcggcggaggaagcggaggcgacatccagatgacccagtctccttcaagcttgtctgcatctgtaggagacagggtcaccatcacttgcagtgccagctcaagtgtaagttacatgcactggtatcagcagaaaccaggcaaggcccctaagagattgatctatgacacatccaaattagcaagtggggtcccaagtcgcttcagtggcagtggatctgggaccgaattcactctcaccatcagcagcttgcagcctgaggattttgcaacttattactgccagcagtggagtggttaccctctcacgttcggtcaggggacaaagttggaaatcaaa

SEQ ID NO: 366 - DNA, 726 bp, synthetic construct
  misc_feature 1..726: note = MSLN scFv domain
  source 1..726: mol_type = other DNA
caggtgcagctgcagcagtctgggcctgagctggagaagcctggggcctcagtgaagatttcctgcaaggcttctggatactcattcaccggctacaccatgaactgggtgaagcagagccatggaaaaagccttgagtggattggacttatcaccccttacaatggtgcttctagctacaaccagaagttcaggggcaaggccacattaactgtagacaagtcatccagcacagcctacatggacctcctcagcctgacatctgaagactctgcagtctatttctgtgcaagggggggttacgacgggaggggttttgactactggggccagggaaccacggtcaccgtgtcctcaggcggaggtggaagcggagggggaggatctggcggcggaggaagcggaggcgacatcgagctcacccagtctcctgcaatcatgtctgcatctccaggagagaaggtcaccatgacttgcagtgccagctcaagtgtaagttacatgcactggtatcagcagaaatcaggcacctcccctaagagatggatctatgacacatccaaattggcaagtggggtcccaggtcgcttcagtggcagtggatctgggaactcttactctctcaccatcagcagcgtggaggctgaggatgatgcaacttattactgccagcagtggagtggttaccctctcacgttcggtgctgggacaaagttggaaatcaaa

SEQ ID NO: 367 - DNA, 735 bp, synthetic construct
  misc_feature 1..735: note = MSLN scFv domain
  source 1..735: mol_type = other DNA
gaagtgcagctggtggaaagcggcggaggcctggtgaaacctggcggcagcctgagactgagctgcgccgccagcggcttcaccttctcgaacgcctggatgagctgggtccgccaggcccctggcaagggactggaatgggtcggacggatcaagagcaagaccgacggcggcaccaccgactacgctgcccccgtgaagggccggttcaccatcagccgggacgacagcaagaacaccctgtacctgcagatgaacagcctgaaaaccgaggacaccgccgtgtattactgtaccacagatcttcctaagcttaggaattttcatatttggggccagggaaccctggtcaccgtgtcctcaggcggaggtggaagcggagggggaggatctggcggcggaggaagcggaggcgacatccagatgacccagtctccatcctccctgtctgcatctgtaggagacagagtcaccatcacttgccgggcaagtcagagcattagcagctatttaaattggtatcagcagaaaccagggaaagcccctaagctcctgatctatgctgcatccagtttgcaaagtggggtcccatcaaggttcagtggcagtggatctgggacagatttcactctcaccatcagcagtctgcaacctgaagattttgcaacttactactgtcaacagagttacagtacccctctcactttcggcggcggaacaaaggtggagatcaag

SEQ ID NO: 368 - DNA, 744 bp, synthetic construct
  misc_feature 1..744: note = MSLN scFv domain
  source 1..744: mol_type = other DNA
gaagtgcagctggtggaaagcggcggaggcctggtgcagcctggcggcagcctgagactgtcttgcgccgccagcggcttcaccttcagcagctacgccatgcactgggtccgccaggcccctggcaagggactggaatacgtgtccgccatcagctcgaacggcggcagcacctactacgccaacagcgtgaagggccggttcaccatcagccgggacaacagcaagaacaccctgtacctgcagatgggcagcctgcgggccgaggatatggccgtgtattactgtgcgagcctagaataccatggctttcgacaatatgggcttcgttattggcattggggccagggaaccctggtcaccgtgtcctcaggcggaggtggaagcggagggggaggatctggcggcggaggaagcggaggcgacatccagatgacccagtctccatcctccctgtctgcatctgtaggagacagagtcaccatcacttgccgggcaagtcagagcattagcagctatttaaattggtatcagcagaaaccagggaaagcccctaagctcctgatctatgctgcatccagtttgcaaagtggggtcccatcaaggttcagtggcagtggatctgggacagatttcactctcaccatcagcagtctgcaacctgaagattttgcaacttactactgtcaacagagttacagtacccctctcactttcggcggcggaacaaaggtggagatcaag

SEQ ID NO: 369 - DNA, 741 bp, synthetic construct
  misc_feature 1..741: note = MSLN scFv domain
  source 1..741: mol_type = other DNA
cagctgcagctccaggaaagcggcagcggcctggtgaaacccagccagaccctgagcctgacctgtgccgtgtccggcggcagcatcagcagcggcggctacagctggtcctggatcagacagccccctggcaagggcctggaatggatcggctacatctaccacagcggctcgacctactacaaccccagcctgaagtccagagtgaccatcagcgtggacagaagcaagaaccagttcagcctgaagctgagcagcgtgacagccgccgacaccgctgtgtattactgtgccagcataaaattctggtttgcggggattaattatttttttccgtggggccagggaaccctggtcaccgtgtcctcaggcggaggtggaagcggagggggaggatctggcggcggaggaagcggaggcgacatccagatgacccagtctccatcctccctgtctgcatctgtaggagacagagtcaccatcacttgccgggcaagtcagagcattagcagctatttaaattggtatcagcagaaaccagggaaagcccctaagctcctgatctatgctgcatccagtttgcaaagtggggtcccatcaaggttcagtggcagtggatctgggacagatttcactctcaccatcagcagtctgcaacctgaagattttgcaacttactactgtcaacagagttacagtacccctctcactttcggcggcggaacaaaggtggagatcaag

SEQ ID NO: 370 - DNA, 729 bp, synthetic construct
  misc_feature 1..729: note = MSLN scFv domain
  source 1..729: mol_type = other DNA
gaagtgcagctggtggaaagcggcggaggcctggtgcagcctggcggcagcctgagactgtcttgcgccgccagcggcttcaccttcagcagctactggatgcactgggtccgccaggcccctggcaagggactggtctgggtgtctcgaatcaacagcgacggcagcagcaccagctacgccgacagcgtgaagggccggttcaccatcagccgggacaacgccaagaacaccctgtacctgcagatgaacagcctgcgggccgaggacaccgccgtgtattactgtgcaagcggatttttgggaatgggctcgaattttatttggggccagggaaccctggtcaccgtgtcctcaggcggaggtggaagcggagggggaggatctggcggcggaggaagcggaggcgacatccagatgacccagtctccatcctccctgtctgcatctgtaggagacagagtcaccatcacttgccgggcaagtcagagcattagcagctatttaaattggtatcagcagaaaccagggaaagcccctaagctcctgatctatgctgcatccagtttgcaaagtggggtcccatcaaggttcagtggcagtggatctgggacagatttcactctcaccatcagcagtctgcaacctgaagattttgcaacttactactgtcaacagagttacagtacccctctcactttcggcggcggaacaaaggtggagatcaag

SEQ ID NO: 371 - DNA, 729 bp, synthetic construct
  misc_feature 1..729: note = MSLN scFv domain
  source 1..729: mol_type = other DNA
caggtgcagctgcaggaaagcggccctggcctggtgaaacccagccagaccctgagcctgacctgcacagtgtccggcggcagcatcagcagcggcggctactactggtcctggatcagacagcaccccggcaagggcctggaatggatcggctacatctactacagcggcagcacctactacaaccccagcctgaagtccctggtgacaatctccgtcgataccagcaagaaccagttcagcctgaagctgagcagcgtgacagccgccgacaccgctgtgtattactgtgcaagcggggacagggcacggtacttcgatctctggggccgtggcaccctggtcactgtgtcctcaggcggaggtggaagcggagggggaggatctggcggcggaggaagcggaggcgacatccagatgacccagtctccatcctccctgtctgcatctgtaggagacagagtcaccatcacttgccgggcaagtcagagcattagcagctatttaaattggtatcagcagaaaccagggaaagcccctaagctcctgatctatgctgcatccagtttgcaaagtggggtcccatcaaggttcagtggcagtggatctgggacagatttcactctcaccatcagcagtctgcaacctgaagattttgcaacttactactgtcaacagagttacagtacccctctcactttcggcggcggaacaaaggtggagatcaag

SEQ ID NO: 372 - DNA, 741 bp, synthetic construct
  misc_feature 1..741: note = MSLN scFv domain
  source 1..741: mol_type = other DNA
gaagtgcagctggtggaaagcggcggaggcctggtgcagcctggcggcagcctgagactgtcttgcgccgccagcggcttcaccttcagcagctactggatgcactgggtccgccaggcccctggcaagggactggtctgggtgtctcgaatcaacagcgacggcagcagcaccagctacgccgacagcgtgaagggccggttcaccatcagccgggacaacgccaagaacaccctgtacctgcagatgaacagcctgcgggccgaggacaccgccgtgtattactgtgcaagatatccacgtggatatcatcagatggttgatgcttttgatatctggggccaagggacaatggtcaccgtgtcctcaggcggaggtggaagcggagggggaggatctggcggcggaggaagcggaggcgacatccagatgacccagtctccatcctccctgtctgcatctgtaggagacagagtcaccatcacttgccgggcaagtcagagcattagcagctatttaaattggtatcagcagaaaccagggaaagcccctaagctcctgatctatgctgcatccagtttgcaaagtggggtcccatcaaggttcagtggcagtggatctgggacagatttcactctcaccatcagcagtctgcaacctgaagattttgcaacttactactgtcaacagagttacagtacccctctcactttcggcggcggaacaaaggtggagatcaag

SEQ ID NO: 373 - DNA, 750 bp, synthetic construct
  misc_feature 1..750: note = MSLN scFv domain
  source 1..750: mol_type = other DNA
cagctgcagctccaggaaagcggccctggcctggtgaaacccagcgagacactgagcctgacctgcaccgtgtccggcggcagcatcagcagcagcagctactactggggctggatcagacagccccctggcaagggcctggaatggatcggctcgatctactacagcggctccacctactacaaccccagcctgaagtccagagtgaccatcagcgtggacaccagcaagaaccagttcagcctgaagctgagcagcgtgacagccgccgacaccgctgtgtattactgtgcgagagtacgatttttggctgctcgcactactattccggaggcgaattttctttggggccagggaaccctggtcaccgtgtcctcaggcggaggtggaagcggagggggaggatctggcggcggaggaagcggaggcgacatccagatgacccagtctccatcctccctgtctgcatctgtaggagacagagtcaccatcacttgccgggcaagtcagagcattagcagctatttaaattggtatcagcagaaaccagggaaagcccctaagctcctgatctatgctgcatccagtttgcaaagtggggtcccatcaaggttcagtggcagtggatctgggacagatttcactctcaccatcagcagtctgcaacctgaagattttgcaacttactactgtcaacagagttacagtacccctctcactttcggcggcggaacaaaggtggagatcaag

SEQ ID NO: 374 - DNA, 726 bp, synthetic construct
  misc_feature 1..726: note = MSLN scFv domain
  source 1..726: mol_type = other DNA
gaagtgcagctggtggaaagcggcggaggcctggtgcagcctggcggcagcctgagactgtcttgcgccgccagcggcttcaccttcagcagctacagcatgaactgggtccgccaggcccctggcaagggactggaatgggtgtcctacatcagcagcagcagctccaccatctactacgccgacagcgtgaagggtcgattcaccatcagccgggacaacgccaagaacagcctgtacctgcagatgaacagcctgcgggccgaggacaccgccgtgtattactgtgcgagagtactctccagggctaggtttgactactggggccagggaaccctggtcaccgtgtcctcaggcggaggtggaagcggagggggaggatctggcggcggaggaagcggaggcgacatccagatgacccagtctccatcctccctgtctgcatctgtaggagacagagtcaccatcacttgccgggcaagtcagagcattagcagctatttaaattggtatcagcagaaaccagggaaagcccctaagctcctgatctatgctgcatccagtttgcaaagtggggtcccatcaaggttcagtggcagtggatctgggacagatttcactctcaccatcagcagtctgcaacctgaagattttgcaacttactactgtcaacagagttacagtacccctctcactttcggcggcggaacaaaggtggagatcaag

SEQ ID NO: 375 - DNA, 723 bp, synthetic construct
  misc_feature 1..723: note = MSLN scFv domain
  source 1..723: mol_type = other DNA
gaagtgcagctggtggaaagcggcggaggcctggtgaaacctggcggcagcctgagactgagctgcgccgccagcggcttcaccttcagcagctacagcatgaactgggtccgccaggcccctggcaagggactggaatgggtgtcctcgatcagcagcagcagctcctacatctactacgccgacagcgtgaagggccggttcaccatcagccgggacaacgccaagaacagcctgtacctgcagatgaacagcctgcgggccgaggacaccgccgtgtattactgtgcgagattacgagggagggtgttcgacccctggggccagggaaccctggtcaccgtgtcctcaggcggaggtggaagcggagggggaggatctggcggcggaggaagcggaggcgacatccagatgacccagtctccatcctccctgtctgcatctgtaggagacagagtcaccatcacttgccgggcaagtcagagcattagcagctatttaaattggtatcagcagaaaccagggaaagcccctaagctcctgatctatgctgcatccagtttgcaaagtggggtcccatcaaggttcagtggcagtggatctgggacagatttcactctcaccatcagcagtctgcaacctgaagattttgcaacttactactgtcaacagagttacagtacccctctcactttcggcggcggaacaaaggtggagatcaag

SEQ ID NO: 376 - DNA, 741 bp, synthetic construct
  misc_feature 1..741: note = MSLN scFv domain
  source 1..741: mol_type = other DNA
cagctgcagctccaggaaagcggccctggcctggtgaaacccagcgagacactgagcctgacctgcaccgtgtccggcggcagcatcagcagcagcagctactactggggctggatcagacagccccctggcaagggcctggaatggatcggctcgatctactacagcggctccacctactacaaccccagcctgaagtccagagtgaccatcagcgtggacaccagcaagaaccagttcagcctgaagctgagcagcgtgacagccgccgacaccgctgtgtattactgtgcgagaataaaatttaccagctttttatatgttcatggttttctgtggggccagggaaccctggtcaccgtgtcctcaggcggaggtggaagcggagggggaggatctggcggcggaggaagcggaggcgacatccagatgacccagtctccatcctccctgtctgcatctgtaggagacagagtcaccatcacttgccgggcaagtcagagcattagcagctatttaaattggtatcagcagaaaccagggaaagcccctaagctcctgatctatgctgcatccagtttgcaaagtggggtcccatcaaggttcagtggcagtggatctgggacagatttcactctcaccatcagcagtctgcaacctgaagattttgcaacttactactgtcaacagagttacagtacccctctcactttcggcggcggaacaaaggtggagatcaag

SEQ ID NO: 377 - DNA, 738 bp, synthetic construct
  misc_feature 1..738: note = MSLN scFv domain
  source 1..738: mol_type = other DNA
caggtgcagctggtgcagtctggcgccgaagtgaagaaacctggcgcctccgtgaaggtgtcctgcaaggccagcggctacaccttcaccagctacgccatgcactgggttcgacaggcccctggccagagactggaatggatgggctggatcaacgccggcaacggcaacaccaagtacagccagaaattccagggcagagtgaccatcacccgggacaccagcgccagcaccgcctacatggaactgagcagcctgcggagcgaggacaccgctgtgtattactgtgcgagaggccagagatggctgtacctcggggggattcgtcggcattggggccagggaaccctggtcaccgtgtcctcaggcggaggtggaagcggagggggaggatctggcggcggaggaagcggaggcgacatccagatgacccagtctccatcctccctgtctgcatctgtaggagacagagtcaccatcacttgccgggcaagtcagagcattagcagctatttaaattggtatcagcagaaaccagggaaagcccctaagctcctgatctatgctgcatccagtttgcaaagtggggtcccatcaaggttcagtggcagtggatctgggacagatttcactctcaccatcagcagtctgcaacctgaagattttgcaacttactactgtcaacagagttacagtacccctctcactttcggcggcggaacaaaggtggagatcaag

SEQ ID NO: 378 - DNA, 732 bp, synthetic construct
  misc_feature 1..732: note = MSLN scFv domain
  source 1..732: mol_type = other DNA
caggtgcagctgcaggaaagcggccctggcctggtgaaacccagcgagacactgagcctgacctgcaccgtgtccggcggcagcatcagcagctactactggtcctggatcagacagccccctggcaagggcctggaatggatcggctacatctactacagcggcagcaccaactacaaccccagcctgaagtccagagtgaccatctccgtcgataccagcaagaaccagttcagcctgaagctgagcagcgtgacagccgccgacaccgctgtgtattactgtgcgagagaatggattcccagccgtccgtactactttgactactggggccagggaaccctggtcaccgtgtcctcaggcggaggtggaagcggagggggaggatctggcggcggaggaagcggaggcgacatccagatgacccagtctccatcctccctgtctgcatctgtaggagacagagtcaccatcacttgccgggcaagtcagagcattagcagctatttaaattggtatcagcagaaaccagggaaagcccctaagctcctgatctatgctgcatccagtttgcaaagtggggtcccatcaaggttcagtggcagtggatctgggacagatttcactctcaccatcagcagtctgcaacctgaagattttgcaacttactactgtcaacagagttacagtacccctctcactttcggcggcggaacaaaggtggagatcaag

SEQ ID NO: 379 - DNA, 732 bp, synthetic construct
  misc_feature 1..732: note = MSLN scFv domain
  source 1..732: mol_type = other DNA
caggtgcagctgcaggaaagcggccctggcctggtgaaacccagccagaccctgagcctgacctgcacagtgtccggcggctcgatcagcagcggcggctactactggtcctggatcagacagccccctggcaagggcctggaatggatcggctacatctactacagcggcagcacctactacaaccccagcctgaagtccagagtgaccatcagcgtggacaccagcaagaaccagttcagcctgaagctgagcagcgtgacagccgccgacaccgctgtgtattactgtgcgagagaaagtaccggtacaggagcttttgatatctggggccaagggacaatggtcaccgtgtcctcaggcggaggtggaagcggagggggaggatctggcggcggaggaagcggaggcgacatccagatgacccagtctccatcctccctgtctgcatctgtaggagacagagtcaccatcacttgccgggcaagtcagagcattagcagctatttaaattggtatcagcagaaaccagggaaagcccctaagctcctgatctatgctgcatccagtttgcaaagtggggtcccatcaaggttcagtggcagtggatctgggacagatttcactctcaccatcagcagtctgcaacctgaagattttgcaacttactactgtcaacagagttacagtacccctctcactttcggcggcggaacaaaggtggagatcaag

SEQ ID NO: 380 - DNA, 738 bp, synthetic construct
  misc_feature 1..738: note = MSLN scFv domain
  source 1..738: mol_type = other DNA
gaagtgcagctggtggaaagcggaggcggagtggttcgacctggcggaagcctgagactgtcttgcgccgccagcggcttcacctttgacgactacggcatgagctgggtccgccaggcccctggcaagggactggaatgggtgtccggcatcaactggaacggcggcagcaccggctacgccgacagcgtgaagggccggttcaccatcagccgggacaacgccaagaacagcctgtacctgcagatgaacagcctgcgggccgaggacaccgccttgtatcactgtgcgagagagaggtacaggcgggtactccactggtacttcgatctctggggccgtggcaccctggtcactgtgtcctcaggcggaggtggaagcggagggggaggatctggcggcggaggaagcggaggcgacatccagatgacccagtctccatcctccctgtctgcatctgtaggagacagagtcaccatcacttgccgggcaagtcagagcattagcagctatttaaattggtatcagcagaaaccagggaaagcccctaagctcctgatctatgctgcatccagtttgcaaagtggggtcccatcaaggttcagtggcagtggatctgggacagatttcactctcaccatcagcagtctgcaacctgaagattttgcaacttactactgtcaacagagttacagtacccctctcactttcggcggcggaacaaaggtggagatcaag

SEQ ID NO: 381 - DNA, 720 bp, synthetic construct
  misc_feature 1..720: note = MSLN scFv domain
  source 1..720: mol_type = other DNA
caggtgcagctggtgcagtctggcgccgaagtgaagaaacctggcgcctccgtgaaggtgtcctgcaaggccagcggctacaccttcaccagctacgacatcaactgggtccgccaggccaccggacagggcctggaatggatgggctggatgaaccccaacagcggcaacaccggctacgcccagaaattccagggcagagtgaccatgacccggaacacctcgatcagcaccgcctacatggaactgagcagcctgcggagcgaggacaccgctgtgtattactgtgcgagagaaccggatgcttttgatatctggggccaagggacaatggtcaccgtgtcctcaggcggaggtggaagcggagggggaggatctggcggcggaggaagcggaggcgacatccagatgacccagtctccatcctccctgtctgcatctgtaggagacagagtcaccatcacttgccgggcaagtcagagcattagcagctatttaaattggtatcagcagaaaccagggaaagcccctaagctcctgatctatgctgcatccagtttgcaaagtggggtcccatcaaggttcagtggcagtggatctgggacagatttcactctcaccatcagcagtctgcaacctgaagattttgcaacttactactgtcaacagagttacagtacccctctcactttcggcggcggaacaaaggtggagatcaag

SEQ ID NO: 382 - DNA, 738 bp, synthetic construct
  misc_feature 1..738: note = MSLN scFv domain
  source 1..738: mol_type = other DNA
caggtgcagctgcaggaaagcggccctggcctggtgaaacccagccagaccctgagcctgacctgcacagtgtccggcggctcgatcagcagcggcggctactactggtcctggatcagacagccccctggcaagggcctggaatggatcggctacatctactacagcggcagcacctactacaaccccagcctgaagtccagagtgaccatcagcgtggacaccagcaagaaccagttcagcctgaagctgagcagcgtgacagccgccgacaccgctgtgtattactgtgcgagagaacatatggggacgattccgtactactttgactactggggccagggaaccctggtcaccgtgtcctcaggcggaggtggaagcggagggggaggatctggcggcggaggaagcggaggcgacatccagatgacccagtctccatcctccctgtctgcatctgtaggagacagagtcaccatcacttgccgggcaagtcagagcattagcagctatttaaattggtatcagcagaaaccagggaaagcccctaagctcctgatctatgctgcatccagtttgcaaagtggggtcccatcaaggttcagtggcagtggatctgggacagatttcactctcaccatcagcagtctgcaacctgaagattttgcaacttactactgtcaacagagttacagtacccctctcactttcggcggcggaacaaaggtggagatcaag

SEQ ID NO: 383 - DNA, 732 bp, synthetic construct
  misc_feature 1..732: note = MSLN scFv domain
  source 1..732: mol_type = other DNA
caggtgcagctgcaggaaagcggccctggcctggtgaaacccagccagaccctgagcctgacctgcacagtgtccggcggctcgatcagcagcggcggctactactggtcctggatcagacagccccctggcaagggcctggaatggatcggctacatctactacagcggcagcacctactacaaccccagcctgaagtccagagtgaccatcagcgtggacaccagcaagaaccagttcagcctgaagctgagcagcgtgacagccgccgacaccgctgtgtattactgtgcgagagaagagtttggttatggggacgtcctctactggggccagggaaccctggtcaccgtgtcctcaggcggaggtggaagcggagggggaggatctggcggcggaggaagcggaggcgacatccagatgacccagtctccatcctccctgtctgcatctgtaggagacagagtcaccatcacttgccgggcaagtcagagcattagcagctatttaaattggtatcagcagaaaccagggaaagcccctaagctcctgatctatgctgcatccagtttgcaaagtggggtcccatcaaggttcagtggcagtggatctgggacagatttcactctcaccatcagcagtctgcaacctgaagattttgcaacttactactgtcaacagagttacagtacccctctcactttcggcggcggaacaaaggtggagatcaag

SEQ ID NO: 384 - DNA, 732 bp, synthetic construct
  misc_feature 1..732: note = MSLN scFv domain
  source 1..732: mol_type = other DNA
caggtgcagctgcaggaaagcggccctggcctggtgaaacccagccagaccctgagcctgacctgcacagtgtccggcggcagcatcagcagcggcgactactactggtcctggatcagacagccccctggcaagggcctggaatggatcggctacatctactacagcggcagcacctactacaaccccagcctgaagtctcgagtgaccatcagcgtggacaccagcaagaaccagttcagcctgaagctgagcagcgtgacagccgccgacaccgctgtgtattactgtgccagagaggacgtagtcaaaggcgcttttgatatctggggccaagggacaatggtcaccgtgtcctcaggcggaggtggaagcggagggggaggatctggcggcggaggaagcggaggcgacatccagatgacccagtctccatcctccctgtctgcatctgtaggagacagagtcaccatcacttgccgggcaagtcagagcattagcagctatttaaattggtatcagcagaaaccagggaaagcccctaagctcctgatctatgctgcatccagtttgcaaagtggggtcccatcaaggttcagtggcagtggatctgggacagatttcactctcaccatcagcagtctgcaacctgaagattttgcaacttactactgtcaacagagttacagtacccctctcactttcggcggcggaacaaaggtggagatcaag

SEQ ID NO: 385 - DNA, 735 bp, synthetic construct
  misc_feature 1..735: note = MSLN scFv domain
  source 1..735: mol_type = other DNA
gaagtgcagctggtggaaagcggcggaggcctggtgcagcctggcggcagcctgagactgtcttgcgccgccagcggcttcaccttcagcagctacagcatgaactgggtccgccaggcccctggcaagggactggaatgggtgtcctacatcagcagcagcagctccaccatctactacgccgacagcgtgaagggtcgattcaccatcagccgggacaacgccaagaacagcctgtacctgcagatgaacagcctgcgggccgaggacaccgccgtgtattactgtgcgagagaagacttctcgcataagctagggtacttccagcactggggccagggcaccctggtcaccgtgtcctcaggcggaggtggaagcggagggggaggatctggcggcggaggaagcggaggcgacatccagatgacccagtctccatcctccctgtctgcatctgtaggagacagagtcaccatcacttgccgggcaagtcagagcattagcagctatttaaattggtatcagcagaaaccagggaaagcccctaagctcctgatctatgctgcatccagtttgcaaagtggggtcccatcaaggttcagtggcagtggatctgggacagatttcactctcaccatcagcagtctgcaacctgaagattttgcaacttactactgtcaacagagttacagtacccctctcactttcggcggcggaacaaaggtggagatcaag

SEQ ID NO: 386 - DNA, 714 bp, synthetic construct
  misc_feature 1..714: note = MSLN scFv domain
  source 1..714: mol_type = other DNA
caggtgcagctggtggaaagcggcggaggcctggtgaaacctggcggcagcctgagactgagctgcgccgccagcggcttcaccttcagcgactactacatgagctggatcagacaggcccctggcaagggactggaatgggtgtcctacatcagcagcagcggctcgaccatctactacgccgacagcgtgaagggccggttcaccatcagccgggacaacgccaagaacagcctgtacctgcagatgaacagcctgcgggccgaggacaccgccgtgtattactgtgcgagagattacgattacgtgtggggccagggaaccctggtcaccgtgtcctcaggcggaggtggaagcggagggggaggatctggcggcggaggaagcggaggcgacatccagatgacccagtctccatcctccctgtctgcatctgtaggagacagagtcaccatcacttgccgggcaagtcagagcattagcagctatttaaattggtatcagcagaaaccagggaaagcccctaagctcctgatctatgctgcatccagtttgcaaagtggggtcccatcaaggttcagtggcagtggatctgggacagatttcactctcaccatcagcagtctgcaacctgaagattttgcaacttactactgtcaacagagttacagtacccctctcactttcggcggcggaacaaaggtggagatcaag

SEQ ID NO: 387 - DNA, 732 bp, synthetic construct
  misc_feature 1..732: note = MSLN scFv domain
  source 1..732: mol_type = other DNA
caggtgcagctgcaggaaagcggccctggcctggtgaaacccagccagaccctgagcctgacctgcacagtgtccggcggcagcatcagcagcggcgactactactggtcctggatcagacagccccctggcaagggcctggaatggatcggctacatctactacagcggcagcacctactacaaccccagcctgaagtctcgagtgaccatcagcgtggacaccagcaagaaccagttcagcctgaagctgagcagcgtgacagccgccgacaccgctgtgtattactgtgccagagatcgccgtgattgggactggttcgacccctggggccagggaaccctggtcaccgtgtcctcaggcggaggtggaagcggagggggaggatctggcggcggaggaagcggaggcgacatccagatgacccagtctccatcctccctgtctgcatctgtaggagacagagtcaccatcacttgccgggcaagtcagagcattagcagctatttaaattggtatcagcagaaaccagggaaagcccctaagctcctgatctatgctgcatccagtttgcaaagtggggtcccatcaaggttcagtggcagtggatctgggacagatttcactctcaccatcagcagtctgcaacctgaagattttgcaacttactactgtcaacagagttacagtacccctctcactttcggcggcggaacaaaggtggagatcaag

SEQ ID NO: 388 - DNA, 729 bp, synthetic construct
  misc_feature 1..729: note = MSLN scFv domain
  source 1..729: mol_type = other DNA
caggtgcagctgcaggaaagcggccctggcctggtgaaacccagcggcaccctgagcctgacctgtgccgtgtctggcggcagcatcagcagcagcaactggtggtcctgggtccgccagcctcccggcaagggcctcgaatggatcggcgagatctaccacagcggcagcaccaactacaaccccagcctgaagtccagagtgaccatcagcgtggacaagagcaagaaccagttcagcctgaagctgagcagcgtgacagccgccgacaccgctgtgtattactgtgcgagagatcagcaggcgttgaaataccgtgtggattggggccagggaaccctggtcaccgtgtcctcaggcggaggtggaagcggagggggaggatctggcggcggaggaagcggaggcgacatccagatgacccagtctccatcctccctgtctgcatctgtaggagacagagtcaccatcacttgccgggcaagtcagagcattagcagctatttaaattggtatcagcagaaaccagggaaagcccctaagctcctgatctatgctgcatccagtttgcaaagtggggtcccatcaaggttcagtggcagtggatctgggacagatttcactctcaccatcagcagtctgcaacctgaagattttgcaacttactactgtcaacagagttacagtacccctctcactttcggcggcggaacaaaggtggagatcaag

SEQ ID NO: 389 - DNA, 726 bp, synthetic construct
  misc_feature 1..726: note = MSLN scFv domain
  source 1..726: mol_type = other DNA
caggtgcagctggtgcagtctggcgccgaagtgaagaaacctggcgcctccgtgaaggtgtcctgcaaggccagcggctacaccttcaccagctacggcatcagctgggtccgccaggctcctggacagggactggaatggatgggctggatcagcgcctacaacggcaacaccaactacgcccagaaactgcagggcagagtgaccatgaccaccgacaccagcaccagcaccgcctacatggaacttcgaagcctgagaagcgacgacaccgccgtgtattactgtgcgagagatcttacgctaggatgctttgactactggggccagggaaccctggtcaccgtgtcctcaggcggaggtggaagcggagggggaggatctggcggcggaggaagcggaggcgacatccagatgacccagtctccatcctccctgtctgcatctgtaggagacagagtcaccatcacttgccgggcaagtcagagcattagcagctatttaaattggtatcagcagaaaccagggaaagcccctaagctcctgatctatgctgcatccagtttgcaaagtggggtcccatcaaggttcagtggcagtggatctgggacagatttcactctcaccatcagcagtctgcaacctgaagattttgcaacttactactgtcaacagagttacagtacccctctcactttcggcggcggaacaaaggtggagatcaag

SEQ ID NO: 390 - DNA, 726 bp, synthetic construct
  misc_feature 1..726: note = MSLN scFv domain
  source 1..726: mol_type = other DNA
gaagtgcagctggtggaaagcggcggaggcctggtgcagcctggcggcagcctgagactgtcttgcgccgccagcggcttcaccgtgtccagcaactacatgagctgggtccgccaggcccctggcaagggactggaatgggtgtccgtgatctacagcggcggcagcacctactacgccgacagcgtgaagggtcgattcaccatcagccgggacaacagcaagaacaccctgtacctgcagatgaacagcctgcgggccgaggacaccgccgtgtattactgtgcgagagatgggtcaaactcttggtacttcgatctctggggccgtggcaccctggtcactgtgtcctcaggcggaggtggaagcggagggggaggatctggcggcggaggaagcggaggcgacatccagatgacccagtctccatcctccctgtctgcatctgtaggagacagagtcaccatcacttgccgggcaagtcagagcattagcagctatttaaattggtatcagcagaaaccagggaaagcccctaagctcctgatctatgctgcatccagtttgcaaagtggggtcccatcaaggttcagtggcagtggatctgggacagatttcactctcaccatcagcagtctgcaacctgaagattttgcaacttactactgtcaacagagttacagtacccctctcactttcggcggcggaacaaaggtggagatcaag

SEQ ID NO: 391 - DNA, 726 bp, synthetic construct
  misc_feature 1..726: note = MSLN scFv domain
  source 1..726: mol_type = other DNA
caggtgcagctggtggaaagcggcggaggcgtggtgcagcccggcagaagccttcgactgagctgcgccgccagcggcttcaccttcagcagctacggcatgcactgggtccgccaggcccctggcaagggactggaatgggtggccgtgatttggtacgacggcagcaacaagtactacgccgacagcgtgaagggccggttcaccatcagccgggacaacagcaagaacaccctgtacctgcagatgaacagcctgcgggccgaggacaccgccgtgtattactgtgcgagggcatttttattcctgtctttttcggtttggggccagggaaccctggtcaccgtgtcctcaggcggaggtggaagcggagggggaggatctggcggcggaggaagcggaggcgacatccagatgacccagtctccatcctccctgtctgcatctgtaggagacagagtcaccatcacttgccgggcaagtcagagcattagcagctatttaaattggtatcagcagaaaccagggaaagcccctaagctcctgatctatgctgcatccagtttgcaaagtggggtcccatcaaggttcagtggcagtggatctgggacagatttcactctcaccatcagcagtctgcaacctgaagattttgcaacttactactgtcaacagagttacagtacccctctcactttcggcggcggaacaaaggtggagatcaag

SEQ ID NO: 392 - DNA, 735 bp, synthetic construct
  misc_feature 1..735: note = MSLN scFv domain
  source 1..735: mol_type = other DNA
gaagtgcagctggtggaatctggcggcgtggtggtgcagcctggcggcagcctgagactgtcttgcgccgccagcggcttcaccttcgacgactacaccatgcactgggtccgccaggcccctggcaagggactggaatgggtgtccctgatcagctgggacggcggctctacctactacgccgactccgtgaagggccggttcaccatcagccgggacaacagcaagaacagcctgtacctgcagatgaacagcctgcggaccgaggacaccgccttgtattactgtgcaaaagggatattctactcgagtaaagaggattttgactactggggccagggaaccctggtcaccgtgtcctcaggcggaggtggaagcggagggggaggatctggcggcggaggaagcggaggcgacatccagatgacccagtctccatcctccctgtctgcatctgtaggagacagagtcaccatcacttgccgggcaagtcagagcattagcagctatttaaattggtatcagcagaaaccagggaaagcccctaagctcctgatctatgctgcatccagtttgcaaagtggggtcccatcaaggttcagtggcagtggatctgggacagatttcactctcaccatcagcagtctgcaacctgaagattttgcaacttactactgtcaacagagttacagtacccctctcactttcggcggcggaacaaaggtggagatcaag

SEQ ID NO: 393 - DNA, 744 bp, synthetic construct
  misc_feature 1..744: note = MSLN scFv domain
  source 1..744: mol_type = other DNA
gaagtgcagctggtggaatctggcggcgtggtggtgcagcctggcggcagcctgagactgtcttgcgccgccagcggcttcaccttcgacgactacaccatgcactgggtccgccaggcccctggcaagggactggaatgggtgtccctgatcagctgggacggcggctctacctactacgccgactccgtgaagggccggttcaccatcagccgggacaacagcaagaacagcctgtacctgcagatgaacagcctgcggaccgaggacaccgccttgtattactgtgcaaaagatatatggatattctactcgagtaatccaaagccgacggtctactggggccagggaaccctggtcaccgtgtcctcaggcggaggtggaagcggagggggaggatctggcggcggaggaagcggaggcgacatccagatgacccagtctccatcctccctgtctgcatctgtaggagacagagtcaccatcacttgccgggcaagtcagagcattagcagctatttaaattggtatcagcagaaaccagggaaagcccctaagctcctgatctatgctgcatccagtttgcaaagtggggtcccatcaaggttcagtggcagtggatctgggacagatttcactctcaccatcagcagtctgcaacctgaagattttgcaacttactactgtcaacagagttacagtacccctctcactttcggcggcggaacaaaggtggagatcaag

SEQ ID NO: 394 - DNA, 738 bp, synthetic construct
  misc_feature 1..738: note = MSLN scFv domain
  source 1..738: mol_type = other DNA
caggtgcagctggtgcagagcggcagcgagctgaagaaacctggcgcctccgtgaaggtgtcctgcaaggccagcggctacaccttcaccagctacgccatgaactgggtccgccaggccccaggccagggactggaatggatgggctggatcaacaccaacaccggcaaccccacctacgcccagggcttcaccggcagattcgtgttcagcttcgacaccagcgtgtccaccgcctacctgcagatctgtagcctgaaggccgaggacaccgccgtgtattactgtgcgaggaaggatcagacgctgacctacggaaactggttcgacccctggggccagggaaccctggtcaccgtgtcctcaggcggaggtggaagcggagggggaggatctggcggcggaggaagcggaggcgacatccagatgacccagtctccatcctccctgtctgcatctgtaggagacagagtcaccatcacttgccgggcaagtcagagcattagcagctatttaaattggtatcagcagaaaccagggaaagcccctaagctcctgatctatgctgcatccagtttgcaaagtggggtcccatcaaggttcagtggcagtggatctgggacagatttcactctcaccatcagcagtctgcaacctgaagattttgcaacttactactgtcaacagagttacagtacccctctcactttcggcggcggaacaaaggtggagatcaag

SEQ ID NO: 395 - DNA, 726 bp, synthetic construct
  misc_feature 1..726: note = MSLN scFv domain
  source 1..726: mol_type = other DNA
caggtgcagctgcaggaaagcggccctggcctggtgaaacccagcgagacactgagcctgacctgcaccgtgtccggcggctctgtgtccagcggctcctactactggtcctggatcagacagccccctggcaagggcctcgaatggatcggctacatctactacagcggcagcaccaactacaaccccagcctgaagtccagagtgaccatcagcgtggacaccagcaagaaccagttcagcctgaagctgagcagcgtgacagccgccgacaccgctgtgtattactgtgcgagagatcattacgagcgggggctctactggggccagggaaccctggtcaccgtgtcctcaggcggaggtggaagcggagggggaggatctggcggcggaggaagcggaggcgacatccagatgacccagtctccatcctccctgtctgcatctgtaggagacagagtcaccatcacttgccgggcaagtcagagcattagcagctatttaaattggtatcagcagaaaccagggaaagcccctaagctcctgatctatgctgcatccagtttgcaaagtggggtcccatcaaggttcagtggcagtggatctgggacagatttcactctcaccatcagcagtctgcaacctgaagattttgcaacttactactgtcaacagagttacagtacccctctcactttcggcggcggaacaaaggtggagatcaag

SEQ ID NO: 396 - DNA, 726 bp, synthetic construct
  misc_feature 1..726: note = MSLN scFv domain
  source 1..726: mol_type = other DNA
caggtgcagctggtggaaagcggcggaggcctggtgaaacctggcggcagcctgagactgagctgcgccgccagcggcttcaccttcagcgactactacatgagctggatcagacaggcccctggcaagggactggaatgggtgtcctacatcagcagcagcggctcgaccatctactacgccgacagcgtgaagggccggttcaccatcagccgggacaacgccaagaacagcctgtacctgcagatgaacagcctgcgggccgaggacaccgccgtgtattactgtgcgagatatatgtataactggtacttcgatctctggggccgtggcaccctggtcactgtgtcctcaggcggaggtggaagcggagggggaggatctggcggcggaggaagcggaggcgacatccagatgacccagagccccagcagcgtgtccgccagcgtgggcgatcgagtgaccatcacctgtcgggcctcccagggcatcagcagctggctggcctggtatcagcagaagcccggcaaggcccccaagctgctgatctacgccgccagcagcctgcagagcggcgtgccaagcagattcagcggcagcggctccggcaccgacttcaccctgaccatcagctccctgcagcccgaggacttcgccacctactactgccagcaggctaacagtttccctctcactttcggcggcggaacaaaggtggagatcaag

SEQ ID NO: 397 - DNA, 723 bp, synthetic construct
  misc_feature 1..723: note = MSLN scFv domain
  source 1..723: mol_type = other DNA
caggtgcagctggtggaaagcggcggaggcctggtgaaacctggcggcagcctgagactgagctgcgccgccagcggcttcaccttcagcgactactacatgagctggatcagacaggcccctggcaagggactggaatgggtgtcctacatcagcagcagcggctcgaccatctactacgccgacagcgtgaagggccggttcaccatcagccgggacaacgccaagaacagcctgtacctgcagatgaacagcctgcgggccgaggacaccgccgtgtattactgtgcgagagatcgaaggcctgcttttgatatctggggccaagggacaatggtcaccgtgtcctcaggcggaggtggaagcggagggggaggatctggcggcggaggaagcggaggcgacatccagatgacccagagccccagcagcgtgtccgccagcgtgggcgatcgagtgaccatcacctgtcgggcctcccagggcatcagcagctggctggcctggtatcagcagaagcccggcaaggcccccaagctgctgatctacgccgccagcagcctgcagagcggcgtgccaagcagattcagcggcagcggctccggcaccgacttcaccctgaccatcagctccctgcagcccgaggacttcgccacctactactgccagcaggctaacagtttccctctcactttcggcggcggaacaaaggtggagatcaag

SEQ ID NO: 398 - DNA, 729 bp, synthetic construct
  misc_feature 1..729: note = MSLN scFv domain
  source 1..729: mol_type = other DNA
caggtgcagctggtggaaagcggcggaggcctggtgaaacctggcggcagcctgagactgagctgcgccgccagcggcttcaccttcagcgactactacatgagctggatcagacaggcccctggcaagggactggaatgggtgtcctacatcagcagcagcggctcgaccatctactacgccgacagcgtgaagggccggttcaccatcagccgggacaacgccaagaacagcctgtacctgcagatgaacagcctgcgggccgaggacaccgccgtgtattactgtgcggtacatttgaaacgacgtccctactttgactactggggccagggaaccctggtcaccgtgtcctcaggcggaggtggaagcggagggggaggatctggcggcggaggaagcggaggcgccatccagctgacccagagccccagcagcctgagcgccagcgtgggcgatagagtgaccatcacctgtcgcgccagccagggcatcagcagcgctctggcctggtatcagcagaagcccggcaaggcccccaagctgctgatctacgacgccagctccctggaaagcggcgtgcccagcagattcagcggcagcggctccggcaccgacttcaccctgaccatcagcagcctgcagcccgaggacttcgccacctactactgccagcagtttaatagttaccctctcactttcggcggcggaacaaaggtggagatcaag

SEQ ID NO: 399 - DNA, 726 bp, synthetic construct
  misc_feature 1..726: note = MSLN scFv domain
  source 1..726: mol_type = other DNA
caggtgcagctggtggaaagcggcggaggcctggtgaaacctggcggcagcctgagactgagctgcgccgccagcggcttcaccttcagcgactactacatgagctggatcagacaggcccctggcaagggactggaatgggtgtcctacatcagcagcagcggctcgaccatctactacgccgacagcgtgaagggccggttcaccatcagccgggacaacgccaagaacagcctgtacctgcagatgaacagcctgcgggccgaggacaccgccgtgtattactgtgcgagcgtacataagaaacccatctttgactactggggccagggaaccctggtcaccgtgtcctcaggcggaggtggaagcggagggggaggatctggcggcggaggaagcggaggcgccatccagctgacccagagccccagcagcctgagcgccagcgtgggcgatagagtgaccatcacctgtcgcgccagccagggcatcagcagcgctctggcctggtatcagcagaagcccggcaaggcccccaagctgctgatctacgacgccagctccctggaaagcggcgtgcccagcagattcagcggcagcggctccggcaccgacttcaccctgaccatcagcagcctgcagcccgaggacttcgccacctactactgccagcagtttaatagttaccctctcactttcggcggcggaacaaaggtggagatcaag

SEQ ID NO: 400 - DNA, 726 bp, synthetic construct
  misc_feature 1..726: note = MSLN scFv domain
  source 1..726: mol_type = other DNA
caggtgcagctggtggaaagcggcggaggcctggtgaaacctggcggcagcctgagactgagctgcgccgccagcggcttcaccttcagcgactactacatgagctggatcagacaggcccctggcaagggactggaatgggtgtcctacatcagcagcagcggctcgaccatctactacgccgacagcgtgaagggccggttcaccatcagccgggacaacgccaagaacagcctgtacctgcagatgaacagcctgcgggccgaggacaccgccgtgtattactgtgcgagtaccagtcggcgctgtaccttccagcactggggccagggcaccctggtcaccgtgtcctcaggcggaggtggaagcggagggggaggatctggcggcggaggaagcggaggcgccatccagctgacccagagccccagcagcctgagcgccagcgtgggcgatagagtgaccatcacctgtcgcgccagccagggcatcagcagcgctctggcctggtatcagcagaagcccggcaaggcccccaagctgctgatctacgacgccagctccctggaaagcggcgtgcccagcagattcagcggcagcggctccggcaccgacttcaccctgaccatcagcagcctgcagcccgaggacttcgccacctactactgccagcagtttaatagttaccctctcactttcggcggcggaacaaaggtggagatcaag

SEQ ID NO: 401 - DNA, 726 bp, synthetic construct
  misc_feature 1..726: note = MSLN scFv domain
  source 1..726: mol_type = other DNA
caggtgcagctggtggaaagcggcggaggcctggtgaaacctggcggcagcctgagactgagctgcgccgccagcggcttcaccttcagcgactactacatgagctggatcagacaggcccctggcaagggactggaatgggtgtcctacatcagcagcagcggctcgaccatctactacgccgacagcgtgaagggccggttcaccatcagccgggacaacgccaagaacagcctgtacctgcagatgaacagcctgcgggccgaggacaccgccgtgtattactgtgcgagtaccagcccgcgtcctctcttccagcactggggccagggcaccctggtcaccgtgtcctcaggcggaggtggaagcggagggggaggatctggcggcggaggaagcggaggcgccatccagctgacccagagccccagcagcctgagcgccagcgtgggcgatagagtgaccatcacctgtcgcgccagccagggcatcagcagcgctctggcctggtatcagcagaagcccggcaaggcccccaagctgctgatctacgacgccagctccctggaaagcggcgtgcccagcagattcagcggcagcggctccggcaccgacttcaccctgaccatcagcagcctgcagcccgaggacttcgccacctactactgccagcagtttaatagttaccctctcactttcggcggcggaacaaaggtggagatcaag

SEQ ID NO: 402 - DNA, 732 bp, synthetic construct
  misc_feature 1..732: note = MSLN scFv domain
  source 1..732: mol_type = other DNA
caggtgcagctggtggaaagcggcggaggcctggtgaaacctggcggcagcctgagactgagctgcgccgccagcggcttcaccttcagcgactactacatgagctggatcagacaggcccctggcaagggactggaatgggtgtcctacatcagcagcagcggctcgaccatctactacgccgacagcgtgaagggccggttcaccatcagccgggacaacgccaagaacagcctgtacctgcagatgaacagcctgcgggccgaggacaccgccgtgtattactgtgcgagcccttaccaagtccgaggagtctactttgactactggggccagggaaccctggtcaccgtgtcctcaggcggaggtggaagcggagggggaggatctggcggcggaggaagcggaggcgccatccagctgacccagagccccagcagcctgagcgccagcgtgggcgatagagtgaccatcacctgtcgcgccagccagggcatcagcagcgctctggcctggtatcagcagaagcccggcaaggcccccaagctgctgatctacgacgccagctccctggaaagcggcgtgcccagcagattcagcggcagcggctccggcaccgacttcaccctgaccatcagcagcctgcagcccgaggacttcgccacctactactgccagcagtttaatagttaccctctcactttcggcggcggaacaaaggtggagatcaag

SEQ ID NO: 403 - DNA, 732 bp, synthetic construct
  misc_feature 1..732: note = MSLN scFv domain
  source 1..732: mol_type = other DNA
caggtgcagctggtggaaagcggcggaggcctggtgaaacctggcggcagcctgagactgagctgcgccgccagcggcttcaccttcagcgactactacatgagctggatcagacaggcccctggcaagggactggaatgggtgtcctacatcagcagcagcggctcgaccatctactacgccgacagcgtgaagggccggttcaccatcagccgggacaacgccaagaacagcctgtacctgcagatgaacagcctgcgggccgaggacaccgccgtgtattactgtgcgagcccctataagaaacgacgaacggtctttgactactggggccagggaaccctggtcaccgtgtcctcaggcggaggtggaagcggagggggaggatctggcggcggaggaagcggaggcgccatccagctgacccagagccccagcagcctgagcgccagcgtgggcgatagagtgaccatcacctgtcgcgccagccagggcatcagcagcgctctggcctggtatcagcagaagcccggcaaggcccccaagctgctgatctacgacgccagctccctggaaagcggcgtgcccagcagattcagcggcagcggctccggcaccgacttcaccctgaccatcagcagcctgcagcccgaggacttcgccacctactactgccagcagtttaatagttaccctctcactttcggcggcggaacaaaggtggagatcaag

SEQ ID NO: 404 - DNA, 729 bp, synthetic construct
  misc_feature 1..729: note = MSLN scFv domain
  source 1..729: mol_type = other DNA
caggtgcagctggtggaaagcggcggaggcctggtgaaacctggcggcagcctgagactgagctgcgccgccagcggcttcaccttcagcgactactacatgagctggatcagacaggcccctggcaagggactggaatgggtgtcctacatcagcagcagcggctcgaccatctactacgccgacagcgtgaagggccggttcaccatcagccgggacaacgccaagaacagcctgtacctgcagatgaacagcctgcgggccgaggacaccgccgtgtattactgtgcgtctttacagcgcgggctggccctcttccagcactggggccagggcaccctggtcaccgtgtcctcaggcggaggtggaagcggagggggaggatctggcggcggaggaagcggaggcgccatccagctgacccagagccccagcagcctgagcgccagcgtgggcgatagagtgaccatcacctgtcgcgccagccagggcatcagcagcgctctggcctggtatcagcagaagcccggcaaggcccccaagctgctgatctacgacgccagctccctggaaagcggcgtgcccagcagattcagcggcagcggctccggcaccgacttcaccctgaccatcagcagcctgcagcccgaggacttcgccacctactactgccagcagtttaatagttaccctctcactttcggcggcggaacaaaggtggagatcaag

SEQ ID NO: 405 - DNA, 726 bp, synthetic construct
  misc_feature 1..726: note = MSLN scFv domain
  source 1..726: mol_type = other DNA
caggtgcagctggtggaaagcggcggaggcctggtgaaacctggcggcagcctgagactgagctgcgccgccagcggcttcaccttcagcgactactacatgagctggatcagacaggcccctggcaagggactggaatgggtgtcctacatcagcagcagcggctcgaccatctactacgccgacagcgtgaagggccggttcaccatcagccgggacaacgccaagaacagcctgtacctgcagatgaacagcctgcgggccgaggacaccgccgtgtattactgtgctagcatattgtcagttccgtacttcgatctctggggccgtggcaccctggtcactgtgtcctcaggcggaggtggaagcggagggggaggatctggcggcggaggaagcggaggcgccatccagctgacccagagccccagcagcctgagcgccagcgtgggcgatagagtgaccatcacctgtcgcgccagccagggcatcagcagcgctctggcctggtatcagcagaagcccggcaaggcccccaagctgctgatctacgacgccagctccctggaaagcggcgtgcccagcagattcagcggcagcggctccggcaccgacttcaccctgaccatcagcagcctgcagcccgaggacttcgccacctactactgccagcagtttaatagttaccctctcactttcggcggcggaacaaaggtggagatcaag

SEQ ID NO: 406 - DNA, 741 bp, synthetic construct
  misc_feature 1..741: note = MSLN scFv domain
  source 1..741: mol_type = other DNA
caggtgcagctggtggaaagcggcggaggcctggtgaaacctggcggcagcctgagactgagctgcgccgccagcggcttcaccttcagcgactactacatgagctggatcagacaggcccctggcaagggactggaatgggtgtcctacatcagcagcagcggctcgaccatctactacgccgacagcgtgaagggccggttcaccatcagccgggacaacgccaagaacagcctgtacctgcagatgaacagcctgcgggccgaggacaccgccgtgtattactgtgcgagtgggtggattcgtgtacctttacgattgcccctcttccagcactggggccagggcaccctggtcaccgtgtcctcaggcggaggtggaagcggagggggaggatctggcggcggaggaagcggaggcgccatccagctgacccagagccccagcagcctgagcgccagcgtgggcgatagagtgaccatcacctgtcgcgccagccagggcatcagcagcgctctggcctggtatcagcagaagcccggcaaggcccccaagctgctgatctacgacgccagctccctggaaagcggcgtgcccagcagattcagcggcagcggctccggcaccgacttcaccctgaccatcagcagcctgcagcccgaggacttcgccacctactactgccagcagtttaatagttaccctctcactttcggcggcggaacaaaggtggagatcaag

SEQ ID NO: 407 - DNA, 726 bp, synthetic construct
  misc_feature 1..726: note = MSLN scFv domain
  source 1..726: mol_type = other DNA
caggtgcagctggtggaaagcggcggaggcctggtgaaacctggcggcagcctgagactgagctgcgccgccagcggcttcaccttcagcgactactacatgagctggatcagacaggcccctggcaagggactggaatgggtgtcctacatcagcagcagcggctcgaccatctactacgccgacagcgtgaagggccggttcaccatcagccgggacaacgccaagaacagcctgtacctgcagatgaacagcctgcgggccgaggacaccgccgtgtattactgtgcgagagtaaccatatttgcgatatttgatatctggggccaagggacaatggtcaccgtgtcctcaggcggaggtggaagcggagggggaggatctggcggcggaggaagcggaggcgccatccagctgacccagagccccagcagcctgagcgccagcgtgggcgatagagtgaccatcacctgtcgcgccagccagggcatcagcagcgctctggcctggtatcagcagaagcccggcaaggcccccaagctgctgatctacgacgccagctccctggaaagcggcgtgcccagcagattcagcggcagcggctccggcaccgacttcaccctgaccatcagcagcctgcagcccgaggacttcgccacctactactgccagcagtttaatagttaccctctcactttcggcggcggaacaaaggtggagatcaag

SEQ ID NO: 408 - DNA, 729 bp, synthetic construct
  misc_feature 1..729: note = MSLN scFv domain
  source 1..729: mol_type = other DNA
caggtgcagctggtggaaagcggcggaggcctggtgaaacctggcggcagcctgagactgagctgcgccgccagcggcttcaccttcagcgactactacatgagctggatcagacaggcccctggcaagggactggaatgggtgtcctacatcagcagcagcggctcgaccatctactacgccgacagcgtgaagggccggttcaccatcagccgggacaacgccaagaacagcctgtacctgcagatgaacagcctgcgggccgaggacaccgccgtgtattactgtgcgagagtgggacgtggattcgttcattttgatctctggggccgtggcaccctggtcactgtgtcctcaggcggaggtggaagcggagggggaggatctggcggcggaggaagcggaggcgccatccagctgacccagagccccagcagcctgagcgccagcgtgggcgatagagtgaccatcacctgtcgcgccagccagggcatcagcagcgctctggcctggtatcagcagaagcccggcaaggcccccaagctgctgatctacgacgccagctccctggaaagcggcgtgcccagcagattcagcggcagcggctccggcaccgacttcaccctgaccatcagcagcctgcagcccgaggacttcgccacctactactgccagcagtttaatagttaccctctcactttcggcggcggaacaaaggtggagatcaag

SEQ ID NO: 409 - DNA, 732 bp, synthetic construct
  misc_feature 1..732: note = MSLN scFv domain
  source 1..732: mol_type = other DNA
caggtgcagctggtggaaagcggcggaggcctggtgaaacctggcggcagcctgagactgagctgcgccgccagcggcttcaccttcagcgactactacatgagctggatcagacaggcccctggcaagggactggaatgggtgtcctacatcagcagcagcggctcgaccatctactacgccgacagcgtgaagggccggttcaccatcagccgggacaacgccaagaacagcctgtacctgcagatgaacagcctgcgggccgaggacaccgccgtgtattactgtgcgaggacgtcaagaggtttgtgtgttttatttgactactggggccagggaaccctggtcaccgtgtcctcaggcggaggtggaagcggagggggaggatctggcggcggaggaagcggaggcgccatccagctgacccagagccccagcagcctgagcgccagcgtgggcgatagagtgaccatcacctgtcgcgccagccagggcatcagcagcgctctggcctggtatcagcagaagcccggcaaggcccccaagctgctgatctacgacgccagctccctggaaagcggcgtgcccagcagattcagcggcagcggctccggcaccgacttcaccctgaccatcagcagcctgcagcccgaggacttcgccacctactactgccagcagtttaatagttaccctctcactttcggcggcggaacaaaggtggagatcaag

SEQ ID NO: 410 - DNA, 732 bp, synthetic construct
  misc_feature 1..732: note = MSLN scFv domain
  source 1..732: mol_type = other DNA
caggtgcagctggtggaaagcggcggaggcctggtgaaacctggcggcagcctgagactgagctgcgccgccagcggcttcaccttcagcgactactacatgagctggatcagacaggcccctggcaagggactggaatgggtgtcctacatcagcagcagcggctcgaccatctactacgccgacagcgtgaagggccggttcaccatcagccgggacaacgccaagaacagcctgtacctgcagatgaacagcctgcgggccgaggacaccgccgtgtattactgtgcgagaagtgggcccagtagctactggtacttcgatctctggggccgtggcaccctggtcactgtgtcctcaggcggaggtggaagcggagggggaggatctggcggcggaggaagcggaggcgccatccagctgacccagagccccagcagcctgagcgccagcgtgggcgatagagtgaccatcacctgtcgcgccagccagggcatcagcagcgctctggcctggtatcagcagaagcccggcaaggcccccaagctgctgatctacgacgccagctccctggaaagcggcgtgcccagcagattcagcggcagcggctccggcaccgacttcaccctgaccatcagcagcctgcagcccgaggacttcgccacctactactgccagcagtttaatagttaccctctcactttcggcggcggaacaaaggtggagatcaag

SEQ ID NO: 411 - DNA, 732 bp, synthetic construct
  misc_feature 1..732: note = MSLN scFv domain
  source 1..732: mol_type = other DNA
caggtgcagctggtggaaagcggcggaggcctggtgaaacctggcggcagcctgagactgagctgcgccgccagcggcttcaccttcagcgactactacatgagctggatcagacaggcccctggcaagggactggaatgggtgtcctacatcagcagcagcggctcgaccatctactacgccgacagcgtgaagggccggttcaccatcagccgggacaacgccaagaacagcctgtacctgcagatgaacagcctgcgggccgaggacaccgccgtgtattactgtgcgagaaacatttacatgggcgggatctggttcgacccctggggccagggaaccctggtcaccgtgtcctcaggcggaggtggaagcggagggggaggatctggcggcggaggaagcggaggcgccatccagctgacccagagccccagcagcctgagcgccagcgtgggcgatagagtgaccatcacctgtcgcgccagccagggcatcagcagcgctctggcctggtatcagcagaagcccggcaaggcccccaagctgctgatctacgacgccagctccctggaaagcggcgtgcccagcagattcagcggcagcggctccggcaccgacttcaccctgaccatcagcagcctgcagcccgaggacttcgccacctactactgccagcagtttaatagttaccctctcactttcggcggcggaacaaaggtggagatcaag

SEQ ID NO: 412 - DNA, 729 bp, synthetic construct
  misc_feature 1..729: note = MSLN scFv domain
  source 1..729: mol_type = other DNA
caggtgcagctggtggaaagcggcggaggcctggtgaaacctggcggcagcctgagactgagctgcgccgccagcggcttcaccttcagcgactactacatgagctggatcagacaggcccctggcaagggactggaatgggtgtcctacatcagcagcagcggctcgaccatctactacgccgacagcgtgaagggccggttcaccatcagccgggacaacgccaagaacagcctgtacctgcagatgaacagcctgcgggccgaggacaccgccgtgtattactgtgcgagacttacagtccgcactggagcttttgatatctggggccaagggacaatggtcaccgtgtcctcaggcggaggtggaagcggagggggaggatctggcggcggaggaagcggaggcgccatccagctgacccagagccccagcagcctgagcgccagcgtgggcgatagagtgaccatcacctgtcgcgccagccagggcatcagcagcgctctggcctggtatcagcagaagcccggcaaggcccccaagctgctgatctacgacgccagctccctggaaagcggcgtgcccagcagattcagcggcagcggctccggcaccgacttcaccctgaccatcagcagcctgcagcccgaggacttcgccacctactactgccagcagtttaatagttaccctctcactttcggcggcggaacaaaggtggagatcaag

SEQ ID NO: 413 - DNA, 729 bp, synthetic construct
  misc_feature 1..729: note = MSLN scFv domain
  source 1..729: mol_type = other DNA
caggtgcagctggtggaaagcggcggaggcctggtgaaacctggcggcagcctgagactgagctgcgccgccagcggcttcaccttcagcgactactacatgagctggatcagacaggcccctggcaagggactggaatgggtgtcctacatcagcagcagcggctcgaccatctactacgccgacagcgtgaagggccggttcaccatcagccgggacaacgccaagaacagcctgtacctgcagatgaacagcctgcgggccgaggacaccgccgtgtattactgtgcgagactaagaactgcccacctggacttcgatctctggggccgtggcaccctggtcactgtgtcctcaggcggaggtggaagcggagggggaggatctggcggcggaggaagcggaggcgccatccagctgacccagagccccagcagcctgagcgccagcgtgggcgatagagtgaccatcacctgtcgcgccagccagggcatcagcagcgctctggcctggtatcagcagaagcccggcaaggcccccaagctgctgatctacgacgccagctccctggaaagcggcgtgcccagcagattcagcggcagcggctccggcaccgacttcaccctgaccatcagcagcctgcagcccgaggacttcgccacctactactgccagcagtttaatagttaccctctcactttcggcggcggaacaaaggtggagatcaag

SEQ ID NO: 414 - DNA, 729 bp, synthetic construct
  misc_feature 1..729: note = MSLN scFv domain
  source 1..729: mol_type = other DNA
caggtgcagctggtggaaagcggcggaggcctggtgaaacctggcggcagcctgagactgagctgcgccgccagcggcttcaccttcagcgactactacatgagctggatcagacaggcccctggcaagggactggaatgggtgtcctacatcagcagcagcggctcgaccatctactacgccgacagcgtgaagggccggttcaccatcagccgggacaacgccaagaacagcctgtacctgcagatgaacagcctgcgggccgaggacaccgccgtgtattactgtgcgagagatctcatatttccagtagtctttgactactggggccagggaaccctggtcaccgtgtcctcaggcggaggtggaagcggagggggaggatctggcggcggaggaagcggaggcgccatccagctgacccagagccccagcagcctgagcgccagcgtgggcgatagagtgaccatcacctgtcgcgccagccagggcatcagcagcgctctggcctggtatcagcagaagcccggcaaggcccccaagctgctgatctacgacgccagctccctggaaagcggcgtgcccagcagattcagcggcagcggctccggcaccgacttcaccctgaccatcagcagcctgcagcccgaggacttcgccacctactactgccagcagtttaatagttaccctctcactttcggcggcggaacaaaggtggagatcaag

SEQ ID NO: 415 - DNA, 738 bp, synthetic construct
  misc_feature 1..738: note = MSLN scFv domain
  source 1..738: mol_type = other DNA
caggtgcagctggtggaaagcggcggaggcctggtgaaacctggcggcagcctgagactgagctgcgccgccagcggcttcaccttcagcgactactacatgagctggatcagacaggcccctggcaagggactggaatgggtgtcctacatcagcagcagcggctcgaccatctactacgccgacagcgtgaagggccggttcaccatcagccgggacaacgccaagaacagcctgtacctgcagatgaacagcctgcgggccgaggacaccgccgtgtattactgtgcgagagatggatatcgcaaatatggttacgtattttttgatatctggggccaagggacaatggtcaccgtgtcctcaggcggaggtggaagcggagggggaggatctggcggcggaggaagcggaggcgccatccagctgacccagagccccagcagcctgagcgccagcgtgggcgatagagtgaccatcacctgtcgcgccagccagggcatcagcagcgctctggcctggtatcagcagaagcccggcaaggcccccaagctgctgatctacgacgccagctccctggaaagcggcgtgcccagcagattcagcggcagcggctccggcaccgacttcaccctgaccatcagcagcctgcagcccgaggacttcgccacctactactgccagcagtttaatagttaccctctcactttcggcggcggaacaaaggtggagatcaag

SEQ ID NO: 416 - DNA, 738 bp, synthetic construct
  misc_feature 1..738: note = MSLN scFv domain
  source 1..738: mol_type = other DNA
caggtgcagctggtggaaagcggcggaggcctggtgaaacctggcggcagcctgagactgagctgcgccgccagcggcttcaccttcagcgactactacatgagctggatcagacaggcccctggcaagggactggaatgggtgtcctacatcagcagcagcggctcgaccatctactacgccgacagcgtgaagggccggttcaccatcagccgggacaacgccaagaacagcctgtacctgcagatgaacagcctgcgggccgaggacaccgccgtgtattactgtgcgagagatgggaggtacaggcggttctggcatgcttttgatatctggggccaagggacaatggtcaccgtgtcctcaggcggaggtggaagcggagggggaggatctggcggcggaggaagcggaggcgccatccagctgacccagagccccagcagcctgagcgccagcgtgggcgatagagtgaccatcacctgtcgcgccagccagggcatcagcagcgctctggcctggtatcagcagaagcccggcaaggcccccaagctgctgatctacgacgccagctccctggaaagcggcgtgcccagcagattcagcggcagcggctccggcaccgacttcaccctgaccatcagcagcctgcagcccgaggacttcgccacctactactgccagcagtttaatagttaccctctcactttcggcggcggaacaaaggtggagatcaag

SEQ ID NO: 417 - DNA, 726 bp, synthetic construct
  misc_feature 1..726: note = MSLN scFv domain
  source 1..726: mol_type = other DNA
caggtgcagctggtggaaagcggcggaggcctggtgaaacctggcggcagcctgagactgagctgcgccgccagcggcttcaccttcagcgactactacatgagctggatcagacaggcccctggcaagggactggaatgggtgtcctacatcagcagcagcggctcgaccatctactacgccgacagcgtgaagggccggttcaccatcagccgggacaacgccaagaacagcctgtacctgcagatgaacagcctgcgggccgaggacaccgccgtgtattactgtgcgagagcccatatacgggggtacttcgatctctggggccgtggcaccctggtcactgtgtcctcaggcggaggtggaagcggagggggaggatctggcggcggaggaagcggaggcgccatccagctgacccagagccccagcagcctgagcgccagcgtgggcgatagagtgaccatcacctgtcgcgccagccagggcatcagcagcgctctggcctggtatcagcagaagcccggcaaggcccccaagctgctgatctacgacgccagctccctggaaagcggcgtgcccagcagattcagcggcagcggctccggcaccgacttcaccctgaccatcagcagcctgcagcccgaggacttcgccacctactactgccagcagtttaatagttaccctctcactttcggcggcggaacaaaggtggagatcaag

SEQ ID NO: 418 - DNA, 735 bp, synthetic construct
  misc_feature 1..735: note = MSLN scFv domain
  source 1..735: mol_type = other DNA
gaagtgcagctgctggaaagcggcggaggcctggtgcagcctggcggcagcctgagactgtcttgcgccgccagcggcttcaccttcagcagctacgccatgagctgggtccgccaggcccctggcaagggactcgaatgggtgtccgccatcagcggcagcggcggcagcacctactacgccgacagcgtgaagggccggttcaccatcagccgggacaacagcaagaacaccctgtacctgcagatgaacagcctgcgggccgaggacaccgccgtatattactgtgcgacgtggatggggggcgggggacgatggtacttcgatctctggggccgtggcaccctggtcactgtgtcctcaggcggaggtggaagcggagggggaggatctggcggcggaggaagcggaggcgccatccagctgacccagagccccagcagcctgagcgccagcgtgggcgacagagtgaccatcacctgtcgggccagccagggcatcagcagcgctctggcctggtatcagcagaagcccggcaaggcccccaagctgctgatctacgacgcgtcctccctggaaagcggcgtgcccagcagattcagcggcagcggctccggcaccgacttcaccctgaccatcagcagcctgcagcccgaggacttcgccacctactactgccagcagtttaataattaccctctcactttcggcggcggaacaaaggtggagatcaag

SEQ ID NO: 419 - DNA, 729 bp, synthetic construct
  misc_feature 1..729: note = MSLN scFv domain
  source 1..729: mol_type = other DNA
gaagtgcagctgctggaaagcggcggaggcctggtgcagcctggcggcagcctgagactgtcttgcgccgccagcggcttcaccttcagcagctacgccatgagctgggtccgccaggcccctggcaagggactcgaatgggtgtccgccatcagcggcagcggcggcagcacctactacgccgacagcgtgaagggccggttcaccatcagccgggacaacagcaagaacaccctgtacctgcagatgaacagcctgcgggccgaggacaccgccgtatattactgtgcgagaactagtcgtacaacctggtacttcgatctctggggccgtggcaccctggtcactgtgtcctcaggcggaggtggaagcggagggggaggatctggcggcggaggaagcggaggcgccatccagctgacccagagccccagcagcctgagcgccagcgtgggcgacagagtgaccatcacctgtcgggccagccagggcatcagcagcgctctggcctggtatcagcagaagcccggcaaggcccccaagctgctgatctacgacgcgtcctccctggaaagcggcgtgcccagcagattcagcggcagcggctccggcaccgacttcaccctgaccatcagcagcctgcagcccgaggacttcgccacctactactgccagcagtttaataattaccctctcactttcggcggcggaacaaaggtggagatcaag

SEQ ID NO: 420 - DNA, 735 bp, synthetic construct
  misc_feature 1..735: note = MSLN scFv domain
  source 1..735: mol_type = other DNA
gaagtgcagctgctggaaagcggcggaggcctggtgcagcctggcggcagcctgagactgtcttgcgccgccagcggcttcaccttcagcagctacgccatgagctgggtccgccaggcccctggcaagggactcgaatgggtgtccgccatcagcggcagcggcggcagcacctactacgccgacagcgtgaagggccggttcaccatcagccgggacaacagcaagaacaccctgtacctgcagatgaacagcctgcgggccgaggacaccgccgtatattactgtgcgaaatggatggggggcgggggacgattatacttcgatctctggggccgtggcaccctggtcactgtgtcctcaggcggaggtggaagcggagggggaggatctggcggcggaggaagcggaggcgccatccagctgacccagagccccagcagcctgagcgccagcgtgggcgacagagtgaccatcacctgtcgggccagccagggcatcagcagcgctctggcctggtatcagcagaagcccggcaaggcccccaagctgctgatctacgacgcgtcctccctggaaagcggcgtgcccagcagattcagcggcagcggctccggcaccgacttcaccctgaccatcagcagcctgcagcccgaggacttcgccacctactactgccagcagtttaataattaccctctcactttcggcggcggaacaaaggtggagatcaag

SEQ ID NO: 421 - DNA, 732 bp, synthetic construct
  misc_feature 1..732: note = MSLN scFv domain
  source 1..732: mol_type = other DNA
gaagtgcagctgctggaaagcggcggaggcctggtgcagcctggcggcagcctgagactgtcttgcgccgccagcggcttcaccttcagcagctacgccatgagctgggtccgccaggcccctggcaagggactcgaatgggtgtccgccatcagcggcagcggcggcagcacctactacgccgacagcgtgaagggccggttcaccatcagccgggacaacagcaagaacaccctgtacctgcagatgaacagcctgcgggccgaggacaccgccgtatattactgtgcgaaatggggggggcggttgtactggtacttcgatctctggggccgtggcaccctggtcactgtgtcctcaggcggaggtggaagcggagggggaggatctggcggcggaggaagcggaggcgccatccagctgacccagagccccagcagcctgagcgccagcgtgggcgacagagtgaccatcacctgtcgggccagccagggcatcagcagcgctctggcctggtatcagcagaagcccggcaaggcccccaagctgctgatctacgacgcgtcctccctggaaagcggcgtgcccagcagattcagcggcagcggctccggcaccgacttcaccctgaccatcagcagcctgcagcccgaggacttcgccacctactactgccagcagtttaataattaccctctcactttcggcggcggaacaaaggtggagatcaag

SEQ ID NO: 422 - DNA, 729 bp, synthetic construct
  misc_feature 1..729: note = MSLN scFv domain
  source 1..729: mol_type = other DNA
gaagtgcagctgctggaaagcggcggaggcctggtgcagcctggcggcagcctgagactgtcttgcgccgccagcggcttcaccttcagcagctacgccatgagctgggtccgccaggcccctggcaagggactcgaatgggtgtccgccatcagcggcagcggcggcagcacctactacgccgacagcgtgaagggccggttcaccatcagccgggacaacagcaagaacaccctgtacctgcagatgaacagcctgcgggccgaggacaccgccgtatattactgtgcgaaagttattcggcaactctggtacttcgatctctggggccgtggcaccctggtcactgtgtcctcaggcggaggtggaagcggagggggaggatctggcggcggaggaagcggaggcgccatccagctgacccagagccccagcagcctgagcgccagcgtgggcgacagagtgaccatcacctgtcgggccagccagggcatcagcagcgctctggcctggtatcagcagaagcccggcaaggcccccaagctgctgatctacgacgcgtcctccctggaaagcggcgtgcccagcagattcagcggcagcggctccggcaccgacttcaccctgaccatcagcagcctgcagcccgaggacttcgccacctactactgccagcagtttaataattaccctctcactttcggcggcggaacaaaggtggagatcaag

SEQ ID NO: 423 - DNA, 729 bp, synthetic construct
  misc_feature 1..729: note = MSLN scFv domain
  source 1..729: mol_type = other DNA
gaagtgcagctgctggaaagcggcggaggcctggtgcagcctggcggcagcctgagactgtcttgcgccgccagcggcttcaccttcagcagctacgccatgagctgggtccgccaggcccctggcaagggactcgaatgggtgtccgccatcagcggcagcggcggcagcacctactacgccgacagcgtgaagggccggttcaccatcagccgggacaacagcaagaacaccctgtacctgcagatgaacagcctgcgggccgaggacaccgccgtatattactgtgcgaaagttttcgccaactcctggtacttcgatctctggggccgtggcaccctggtcactgtgtcctcaggcggaggtggaagcggagggggaggatctggcggcggaggaagcggaggcgccatccagctgacccagagccccagcagcctgagcgccagcgtgggcgacagagtgaccatcacctgtcgggccagccagggcatcagcagcgctctggcctggtatcagcagaagcccggcaaggcccccaagctgctgatctacgacgcgtcctccctggaaagcggcgtgcccagcagattcagcggcagcggctccggcaccgacttcaccctgaccatcagcagcctgcagcccgaggacttcgccacctactactgccagcagtttaataattaccctctcactttcggcggcggaacaaaggtggagatcaag

SEQ ID NO: 424 - DNA, 729 bp, synthetic construct
  misc_feature 1..729: note = MSLN scFv domain
  source 1..729: mol_type = other DNA
gaagtgcagctgctggaaagcggcggaggcctggtgcagcctggcggcagcctgagactgtcttgcgccgccagcggcttcaccttcagcagctacgccatgagctgggtccgccaggcccctggcaagggactcgaatgggtgtccgccatcagcggcagcggcggcagcacctactacgccgacagcgtgaagggccggttcaccatcagccgggacaacagcaagaacaccctgtacctgcagatgaacagcctgcgggccgaggacaccgccgtatattactgtgcgaaagtagataggactacctggtacttcgatctctggggccgtggcaccctggtcactgtgtcctcaggcggaggtggaagcggagggggaggatctggcggcggaggaagcggaggcgccatccagctgacccagagccccagcagcctgagcgccagcgtgggcgacagagtgaccatcacctgtcgggccagccagggcatcagcagcgctctggcctggtatcagcagaagcccggcaaggcccccaagctgctgatctacgacgcgtcctccctggaaagcggcgtgcccagcagattcagcggcagcggctccggcaccgacttcaccctgaccatcagcagcctgcagcccgaggacttcgccacctactactgccagcagtttaataattaccctctcactttcggcggcggaacaaaggtggagatcaag

SEQ ID NO: 425 - DNA, 738 bp, synthetic construct
  misc_feature 1..738: note = MSLN scFv domain
  source 1..738: mol_type = other DNA
gaagtgcagctgctggaaagcggcggaggcctggtgcagcctggcggcagcctgagactgtcttgcgccgccagcggcttcaccttcagcagctacgccatgagctgggtccgccaggcccctggcaagggactcgaatgggtgtccgccatcagcggcagcggcggcagcacctactacgccgacagcgtgaagggccggttcaccatcagccgggacaacagcaagaacaccctgtacctgcagatgaacagcctgcgggccgaggacaccgccgtatattactgtgcgaaacgatggggtaaggatggtccttactggtacttcgatctctggggccgtggcaccctggtcactgtgtcctcaggcggaggtggaagcggagggggaggatctggcggcggaggaagcggaggcgccatccagctgacccagagccccagcagcctgagcgccagcgtgggcgacagagtgaccatcacctgtcgggccagccagggcatcagcagcgctctggcctggtatcagcagaagcccggcaaggcccccaagctgctgatctacgacgcgtcctccctggaaagcggcgtgcccagcagattcagcggcagcggctccggcaccgacttcaccctgaccatcagcagcctgcagcccgaggacttcgccacctactactgccagcagtttaataattaccctctcactttcggcggcggaacaaaggtggagatcaag

SEQ ID NO: 426 - DNA, 738 bp, synthetic construct
  misc_feature 1..738: note = MSLN scFv domain
  source 1..738: mol_type = other DNA
gaagtgcagctgctggaaagcggcggaggcctggtgcagcctggcggcagcctgagactgtcttgcgccgccagcggcttcaccttcagcagctacgccatgagctgggtccgccaggcccctggcaagggactcgaatgggtgtccgccatcagcggcagcggcggcagcacctactacgccgacagcgtgaagggccggttcaccatcagccgggacaacagcaagaacaccctgtacctgcagatgaacagcctgcgggccgaggacaccgccgtatattactgtgcgaaaagaagagacagttatggtccttactggtacttcgatctctggggccgtggcaccctggtcactgtgtcctcaggcggaggtggaagcggagggggaggatctggcggcggaggaagcggaggcgccatccagctgacccagagccccagcagcctgagcgccagcgtgggcgacagagtgaccatcacctgtcgggccagccagggcatcagcagcgctctggcctggtatcagcagaagcccggcaaggcccccaagctgctgatctacgacgcgtcctccctggaaagcggcgtgcccagcagattcagcggcagcggctccggcaccgacttcaccctgaccatcagcagcctgcagcccgaggacttcgccacctactactgccagcagtttaataattaccctctcactttcggcggcggaacaaaggtggagatcaag

SEQ ID NO: 427 - DNA, 735 bp, synthetic construct
  misc_feature 1..735: note = MSLN scFv domain
  source 1..735: mol_type = other DNA
gaagtgcagctgctggaaagcggcggaggcctggtgcagcctggcggcagcctgagactgtcttgcgccgccagcggcttcaccttcagcagctacgccatgagctgggtccgccaggcccctggcaagggactcgaatgggtgtccgccatcagcggcagcggcggcagcacctactacgccgacagcgtgaagggccggttcaccatcagccgggacaacagcaagaacaccctgtacctgcagatgaacagcctgcgggccgaggacaccgccgtatattactgtgcgaagaatcgtcccccgcccgggtactggtacttcgatctctggggccgtggcaccctggtcactgtgtcctcaggcggaggtggaagcggagggggaggatctggcggcggaggaagcggaggcgccatccagctgacccagagccccagcagcctgagcgccagcgtgggcgacagagtgaccatcacctgtcgggccagccagggcatcagcagcgctctggcctggtatcagcagaagcccggcaaggcccccaagctgctgatctacgacgcgtcctccctggaaagcggcgtgcccagcagattcagcggcagcggctccggcaccgacttcaccctgaccatcagcagcctgcagcccgaggacttcgccacctactactgccagcagtttaataattaccctctcactttcggcggcggaacaaaggtggagatcaag

SEQ ID NO: 428 - DNA, 729 bp, synthetic construct
  misc_feature 1..729: note = MSLN scFv domain
  source 1..729: mol_type = other DNA
gaagtgcagctgctggaaagcggcggaggcctggtgcagcctggcggcagcctgagactgtcttgcgccgccagcggcttcaccttcagcagctacgccatgagctgggtccgccaggcccctggcaagggactcgaatgggtgtccgccatcagcggcagcggcggcagcacctactacgccgacagcgtgaagggccggttcaccatcagccgggacaacagcaagaacaccctgtacctgcagatgaacagcctgcgggccgaggacaccgccgtatattactgtgcgaagggaagacgatttagctggtacttcgatctctggggccgtggcaccctggtcactgtgtcctcaggcggaggtggaagcggagggggaggatctggcggcggaggaagcggaggcgccatccagctgacccagagccccagcagcctgagcgccagcgtgggcgacagagtgaccatcacctgtcgggccagccagggcatcagcagcgctctggcctggtatcagcagaagcccggcaaggcccccaagctgctgatctacgacgcgtcctccctggaaagcggcgtgcccagcagattcagcggcagcggctccggcaccgacttcaccctgaccatcagcagcctgcagcccgaggacttcgccacctactactgccagcagtttaataattaccctctcactttcggcggcggaacaaaggtggagatcaag

SEQ ID NO: 429 - protein, 5 aa, synthetic construct
  REGION 1..5: note = MSLN scFv domain HC CDR1
NAWMS

SEQ ID NO: 430 - protein, 5 aa, synthetic construct
  REGION 1..5: note = MSLN scFv domain HC CDR1
SYAMH

SEQ ID NO: 431 - protein, 7 aa, synthetic construct
  REGION 1..7: note = MSLN scFv domain HC CDR1
SGGYSWS

SEQ ID NO: 432 - protein, 7 aa, synthetic construct
  REGION 1..7: note = MSLN scFv domain HC CDR1
SGGYYWS

SEQ ID NO: 433 - protein, 7 aa, synthetic construct
  REGION 1..7: note = MSLN scFv domain HC CDR1
SSSYYWG

SEQ ID NO: 434 - protein, 5 aa, synthetic construct
  REGION 1..5: note = MSLN scFv domain HC CDR1
SYSMN

SEQ ID NO: 435 - protein, 5 aa, synthetic construct
  REGION 1..5: note = MSLN scFv domain HC CDR1
SYYWS

SEQ ID NO: 436 - protein, 5 aa, synthetic construct
  REGION 1..5: note = MSLN scFv domain HC CDR1
DYGMS

SEQ ID NO: 437 - protein, 5 aa, synthetic construct
  REGION 1..5: note = MSLN scFv domain HC CDR1
SYDIN

SEQ ID NO: 438 - protein, 7 aa, synthetic construct
  REGION 1..7: note = MSLN scFv domain HC CDR1
SGDYYWS

SEQ ID NO: 439 - protein, 5 aa, synthetic construct
  REGION 1..5: note = MSLN scFv domain HC CDR1
DYYMS

SEQ ID NO: 440 - protein, 6 aa, synthetic construct
  REGION 1..6: note = MSLN scFv domain HC CDR1
SSNWWS

SEQ ID NO: 441 - protein, 5 aa, synthetic construct
  REGION 1..5: note = MSLN scFv domain HC CDR1
SYGIS

SEQ ID NO: 442 - protein, 5 aa, synthetic construct
  REGION 1..5: note = MSLN scFv domain HC CDR1
SNYMS

SEQ ID NO: 443 - protein, 5 aa, synthetic construct
  REGION 1..5: note = MSLN scFv domain HC CDR1
SYGMH

SEQ ID NO: 444 - protein, 5 aa, synthetic construct
  REGION 1..5: note = MSLN scFv domain HC CDR1
DYTMH

SEQ ID NO: 445 - protein, 5 aa, synthetic construct
  REGION 1..5: note = MSLN scFv domain HC CDR1
SYAMN

SEQ ID NO: 446 - protein, 7 aa, synthetic construct
  REGION 1..7: note = MSLN scFv domain HC CDR1
SGSYYWS

SEQ ID NO: 447 - protein, 5 aa, synthetic construct
  REGION 1..5: note = MSLN scFv domain HC CDR1
SYAMS

SEQ ID NO: 448 - protein, 5 aa, synthetic construct
  REGION 1..5: note = MSLN scFv domain HC CDR1
GYTMN

SEQ ID NO: 449 - protein, 5 aa, synthetic construct
  REGION 1..5: note = MSLN scFv domain HC CDR1
SYWMH

SEQ ID NO: 450 - protein, 19 aa, synthetic construct
  REGION 1..19: note = MSLN scFv domain HC CDR2
RIKSKTDGGTTDYAAPVKG

SEQ ID NO: 451 - protein, 17 aa, synthetic construct
  REGION 1..17: note = MSLN scFv domain HC CDR2
AISSNGGSTYYANSVKG

SEQ ID NO: 452 - protein, 16 aa, synthetic construct
  REGION 1..16: note = MSLN scFv domain HC CDR2
YIYHSGSTYYNPSLKS

SEQ ID NO: 453 - protein, 17 aa, synthetic construct
  REGION 1..17: note = MSLN scFv domain HC CDR2
RINSDGSSTSYADSVKG

SEQ ID NO: 454 - protein, 16 aa, synthetic construct
  REGION 1..16: note = MSLN scFv domain HC CDR2
YIYYSGSTYYNPSLKS

SEQ ID NO: 455 - protein, 16 aa, synthetic construct
  REGION 1..16: note = MSLN scFv domain HC CDR2
SIYYSGSTYYNPSLKS

SEQ ID NO: 456 - protein, 17 aa, synthetic construct
  REGION 1..17: note = MSLN scFv domain HC CDR2
YISSSSSTIYYADSVKG

SEQ ID NO: 457 - protein, 17 aa, synthetic construct
  REGION 1..17: note = MSLN scFv domain HC CDR2
SISSSSSYIYYADSVKG

SEQ ID NO: 458 - protein, 17 aa, synthetic construct
  REGION 1..17: note = MSLN scFv domain HC CDR2
WINAGNGNTKYSQKFQG

SEQ ID NO: 459 - protein, 16 aa, synthetic construct
  REGION 1..16: note = MSLN scFv domain HC CDR2
YIYYSGSTNYNPSLKS

SEQ ID NO: 460 - protein, 17 aa, synthetic construct
  REGION 1..17: note = MSLN scFv domain HC CDR2
GINWNGGSTGYADSVKG

SEQ ID NO: 461 - protein, 17 aa, synthetic construct
  REGION 1..17: note = MSLN scFv domain HC CDR2
WMNPNSGNTGYAQKFQG

SEQ ID NO: 462 - protein, 17 aa, synthetic construct
  REGION 1..17: note = MSLN scFv domain HC CDR2
YISSSGSTIYYADSVKG

SEQ ID NO: 463 - protein, 16 aa, synthetic construct
  REGION 1..16: note = MSLN scFv domain HC CDR2
EIYHSGSTNYNPSLKS

SEQ ID NO: 464 - protein, 17 aa, synthetic construct
  REGION 1..17: note = MSLN scFv domain HC CDR2
WISAYNGNTNYAQKLQG

SEQ ID NO: 465 - protein, 16 aa, synthetic construct
  REGION 1..16: note = MSLN scFv domain HC CDR2
VIYSGGSTYYADSVKG

SEQ ID NO: 466 - protein, 17 aa, synthetic construct
  REGION 1..17: note = MSLN scFv domain HC CDR2
VIWYDGSNKYYADSVKG

SEQ ID NO: 467 - protein, 17 aa, synthetic construct
  REGION 1..17: note = MSLN scFv domain HC CDR2
LISWDGGSTYYADSVKG

SEQ ID NO: 468 - protein, 17 aa, synthetic construct
  REGION 1..17: note = MSLN scFv domain HC CDR2
WINTNTGNPTYAQGFTG

SEQ ID NO: 469 - protein, 17 aa, synthetic construct
  REGION 1..17: note = MSLN scFv domain HC CDR2
AISGSGGSTYYADSVKG

SEQ ID NO: 470 - protein, 17 aa, synthetic construct
  REGION 1..17: note = MSLN scFv domain HC CDR2
LITPYNGASSYNQKFRG

SEQ ID NO: 471 - protein, 10 aa, synthetic construct
  REGION 1..10: note = MSLN scFv domain HC CDR3
DLPKLRNFHI

SEQ ID NO: 472 - protein, 15 aa, synthetic construct
  REGION 1..15: note = MSLN scFv domain HC CDR3
LEYHGFRQYGLRYWH

SEQ ID NO: 473 - protein, 13 aa, synthetic construct
  REGION 1..13: note = MSLN scFv domain HC CDR3
IKFWFAGINYFFP

SEQ ID NO: 474 - protein, 10 aa, synthetic construct
  REGION 1..10: note = MSLN scFv domain HC CDR3
GFLGMGSNFI

SEQ ID NO: 475 - protein, 9 aa, synthetic construct
  REGION 1..9: note = MSLN scFv domain HC CDR3
GDRARYFDL

SEQ ID NO: 476 - protein, 14 aa, synthetic construct
  REGION 1..14: note = MSLN scFv domain HC CDR3
YPRGYHQMVDAFDI

SEQ ID NO: 477 - protein, 16 aa, synthetic construct
  REGION 1..16: note = MSLN scFv domain HC CDR3
VRFLAARTTIPEANFL

SEQ ID NO: 478 - protein, 9 aa, synthetic construct
  REGION 1..9: note = MSLN scFv domain HC CDR3
VLSRARFDY

SEQ ID NO: 479 - protein, 8 aa, synthetic construct
  REGION 1..8: note = MSLN scFv domain HC CDR3
LRGRVFDP

SEQ ID NO: 480 - protein, 13 aa, synthetic construct
  REGION 1..13: note = MSLN scFv domain HC CDR3
IKFTSFLYVHGFL

SEQ ID NO: 481 - protein, 13 aa, synthetic construct
  REGION 1..13: note = MSLN scFv domain HC CDR3
GQRWLYLGGIRRH

SEQ ID NO: 482 - protein, 12 aa, synthetic construct
  REGION 1..12: note = MSLN scFv domain HC CDR3
EWIPSRPYYFDY

SEQ ID NO: 483 - protein, 10 aa, synthetic construct
  REGION 1..10: note = MSLN scFv domain HC CDR3
ESTGTGAFDI

SEQ ID NO: 484 - protein, 13 aa, synthetic construct
  REGION 1..13: note = MSLN scFv domain HC CDR3
ERYRRVLHWYFDL

SEQ ID NO: 485 - protein, 7 aa, synthetic construct
  REGION 1..7: note = MSLN scFv domain HC CDR3
EPDAFDI

SEQ ID NO: 486 - protein, 12 aa, synthetic construct
  REGION 1..12: note = MSLN scFv domain HC CDR3
EHMGTIPYYFDY

SEQ ID NO: 487 - protein, 10 aa, synthetic construct
  REGION 1..10: note = MSLN scFv domain HC CDR3
EEFGYGDVLY

SEQ ID NO: 488 - protein, 10 aa, synthetic construct
  REGION 1..10: note = MSLN scFv domain HC CDR3
EDVVKGAFDI

SEQ ID NO: 489 - protein, 12 aa, synthetic construct
  REGION 1..12: note = MSLN scFv domain HC CDR3
EDFSHKLGYFQH

SEQ ID NO: 490 - protein, 5 aa, synthetic construct
  REGION 1..5: note = MSLN scFv domain HC CDR3
DYDYV

SEQ ID NO: 491 - protein, 10 aa, synthetic construct
  REGION 1..10: note = MSLN scFv domain HC CDR3
DRRDWDWFDP

SEQ ID NO: 492 - protein, 10 aa, synthetic construct
  REGION 1..10: note = MSLN scFv domain HC CDR3
DQQALKYRVD

SEQ ID NO: 493 - protein, 9 aa, synthetic construct
  REGION 1..9: note = MSLN scFv domain HC CDR3
DLTLGCFDY

SEQ ID NO: 494 - protein, 10 aa, synthetic construct
  REGION 1..10: note = MSLN scFv domain HC CDR3
DGSNSWYFDL

SEQ ID NO: 495 - protein, 9 aa, synthetic construct
  REGION 1..9: note = MSLN scFv domain HC CDR3
AFLFLSFSV

SEQ ID NO: 496 - protein, 12 aa, synthetic construct
  REGION 1..12: note = MSLN scFv domain HC CDR3
GIFYSSKEDFDY

SEQ ID NO: 497 - protein, 15 aa, synthetic construct
  REGION 1..15: note = MSLN scFv domain HC CDR3
DIWIFYSSNPKPTVY

SEQ ID NO: 498 - protein, 13 aa, synthetic construct
  REGION 1..13: note = MSLN scFv domain HC CDR3
KDQTLTYGNWFDP

SEQ ID NO: 499 - protein, 8 aa, synthetic construct
  REGION 1..8: note = MSLN scFv domain HC CDR3
DHYERGLY

SEQ ID NO: 500 - protein, 9 aa, synthetic construct
  REGION 1..9: note = MSLN scFv domain HC CDR3
YMYNWYFDL

SEQ ID NO: 501 - protein, 8 aa, synthetic construct
  REGION 1..8: note = MSLN scFv domain HC CDR3
DRRPAFDI

SEQ ID NO: 502 - protein, 10 aa, synthetic construct
  REGION 1..10: note = MSLN scFv domain HC CDR3
HLKRRPYFDY

SEQ ID NO: 503 - protein, 9 aa, synthetic construct
  REGION 1..9: note = MSLN scFv domain HC CDR3
VHKKPIFDY

SEQ ID NO: 504 - protein, 9 aa, synthetic construct
  REGION 1..9: note = MSLN scFv domain HC CDR3
TSRRCTFQH

SEQ ID NO: 505 - protein, 9 aa, synthetic construct
  REGION 1..9: note = MSLN scFv domain HC CDR3
TSPRPLFQH

SEQ ID NO: 506 - protein, 11 aa, synthetic construct
  REGION 1..11: note = MSLN scFv domain HC CDR3
PYQVRGVYFDY

SEQ ID NO: 507 - protein, 11 aa, synthetic construct
  REGION 1..11: note = MSLN scFv domain HC CDR3
PYKKRRTVFDY

SEQ ID NO: 508 - protein, 10 aa, synthetic construct
  REGION 1..10: note = MSLN scFv domain HC CDR3
LQRGLALFQH

SEQ ID NO: 509 - protein, 9 aa, synthetic construct
  REGION 1..9: note = MSLN scFv domain HC CDR3
ILSVPYFDL

SEQ ID NO: 510 - protein, 14 aa, synthetic construct
  REGION 1..14: note = MSLN scFv domain HC CDR3
GWIRVPLRLPLFQH

SEQ ID NO: 511 - protein, 9 aa, synthetic construct
  REGION 1..9: note = MSLN scFv domain HC CDR3
VTIFAIFDI

SEQ ID NO: 512 - protein, 10 aa, synthetic construct
  REGION 1..10: note = MSLN scFv domain HC CDR3
VGRGFVHFDL

SEQ ID NO: 513 - protein, 11 aa, synthetic construct
  REGION 1..11: note = MSLN scFv domain HC CDR3
TSRGLCVLFDY

SEQ ID NO: 514 - protein, 11 aa, synthetic construct
  REGION 1..11: note = MSLN scFv domain HC CDR3
SGPSSYWYFDL

SEQ ID NO: 515 - protein, 11 aa, synthetic construct
  REGION 1..11: note = MSLN scFv domain HC CDR3
NIYMGGIWFDP

SEQ ID NO: 516 - protein, 10 aa, synthetic construct
  REGION 1..10: note = MSLN scFv domain HC CDR3
LTVRTGAFDI

SEQ ID NO: 517 - protein, 10 aa, synthetic construct
  REGION 1..10: note = MSLN scFv domain HC CDR3
LRTAHLDFDL

SEQ ID NO: 518 - protein, 10 aa, synthetic construct
  REGION 1..10: note = MSLN scFv domain HC CDR3
DLIFPVVFDY

SEQ ID NO: 519 - protein, 13 aa, synthetic construct
  REGION 1..13: note = MSLN scFv domain HC CDR3
DGYRKYGYVFFDI

SEQ ID NO: 520 - protein, 13 aa, synthetic construct
  REGION 1..13: note = MSLN scFv domain HC CDR3
DGRYRRFWHAFDI

SEQ ID NO: 521 - protein, 9 aa, synthetic construct
  REGION 1..9: note = MSLN scFv domain HC CDR3
AHIRGYFDL

SEQ ID NO: 522 - protein, 12 aa, synthetic construct
  REGION 1..12: note = MSLN scFv domain HC CDR3
WMGGGGRWYFDL

SEQ ID NO: 523 - protein, 10 aa, synthetic construct
  REGION 1..10: note = MSLN scFv domain HC CDR3
TSRTTWYFDL

SEQ ID NO: 524 - protein, 12 aa, synthetic construct
  REGION 1..12: note = MSLN scFv domain HC CDR3
WMGGGGRLYFDL

SEQ ID NO: 525 - protein, 11 aa, synthetic construct
  REGION 1..11: note = MSLN scFv domain HC CDR3
WGGRLYWYFDL

SEQ ID NO: 526 - protein, 10 aa, synthetic construct
  REGION 1..10: note = MSLN scFv domain HC CDR3
VIRQLWYFDL

SEQ ID NO: 527 - protein, 10 aa, synthetic construct
  REGION 1..10: note = MSLN scFv domain HC CDR3
VFANSWYFDL

SEQ ID NO: 528 - protein, 10 aa, synthetic construct
  REGION 1..10: note = MSLN scFv domain HC CDR3
VDRTTWYFDL

SEQ ID NO: 529 - protein, 13 aa, synthetic construct
  REGION 1..13: note = MSLN scFv domain HC CDR3
RWGKDGPYWYFDL

SEQ ID NO: 530 - protein, 13 aa, synthetic construct
  REGION 1..13: note = MSLN scFv domain HC CDR3
RRDSYGPYWYFDL

SEQ ID NO: 531 - protein, 12 aa, synthetic construct
  REGION 1..12: note = MSLN scFv domain HC CDR3
NRPPPGYWYFDL

SEQ ID NO: 532 - protein, 10 aa, synthetic construct
  REGION 1..10: note = MSLN scFv domain HC CDR3
GRRFSWYFDL

SEQ ID NO: 533 - protein, 14 aa, synthetic construct
  REGION 1..14: note = MSLN scFv domain HC CDR3
CAREDVVKGAFDIW

SEQ ID NO: 534 - protein, 10 aa, synthetic construct
  REGION 1..10: note = MSLN scFv domain HC CDR3
GGYDGRGFDY

SEQ ID NO: 535 - protein, 11 aa, synthetic construct
  REGION 1..11: note = MSLN scFv domain LC CDR1
RASQSISSYLN

SEQ ID NO: 536 - protein, 11 aa, synthetic construct
  REGION 1..11: note = MSLN scFv domain LC CDR1
RASQGISSWLA

SEQ ID NO: 537 - protein, 11 aa, synthetic construct
  REGION 1..11: note = MSLN scFv domain LC CDR1
RASQGISSALA

SEQ ID NO: 538 - protein, 10 aa, synthetic construct
  REGION 1..10: note = MSLN scFv domain LC CDR1
SASSSVSYMH

SEQ ID NO: 539 - protein, 7 aa, synthetic construct
  REGION 1..7: note = MSLN scFv domain LC CDR2
AASSLQS

SEQ ID NO: 540 - protein, 7 aa, synthetic construct
  REGION 1..7: note = MSLN scFv domain LC CDR2
DASSLES

SEQ ID NO: 541 - protein, 7 aa, synthetic construct
  REGION 1..7: note = MSLN scFv domain LC CDR2
DTSKLAS

SEQ ID NO: 542 - protein, 9 aa, synthetic construct
  REGION 1..9: note = MSLN scFv domain LC CDR3
QQSYSTPLT

SEQ ID NO: 543 - protein, 9 aa, synthetic construct
  REGION 1..9: note = MSLN scFv domain LC CDR3
QQANSFPLT

SEQ ID NO: 544 - protein, 9 aa, synthetic construct
  REGION 1..9: note = MSLN scFv domain LC CDR3
QQFNSYPLT

SEQ ID NO: 545 - protein, 9 aa, synthetic construct
  REGION 1..9: note = MSLN scFv domain LC CDR3
QQWSGYPLT

SEQ ID NO: 546-547 - skipped (2 entries)

SEQ ID NO: 548 - DNA, 741 bp, synthetic construct
  misc_feature 1..741: note = HLA scFv binding domain
  source 1..741: mol_type = other DNA
gatgttttgatgacccaaactccactctccctgcctgtcagtcttggagatcaagcctccatctcttgcagatctagtcagagcattgtacatagtaatggaaacacctatttagaatggtacctgcagaaaccaggccagtctccaaagctcctgatctacaaagtttccaaccgattttctggggtcccagacaggttcagtggcagtggatcagggacagatttcacactcaagatcagtagagtggaggctgaggatctgggagtttattactgctttcaaggttcacatgttcctcggacgtccggtggaggcaccaagctggaaatcaaaggcggaggtggaagcggagggggaggatctggcggcggaggaagcggaggccaggtccagctgcagcagtctggacctgagctggtgaagcctggggcttcagtgaggatatcctgcaaggcttctggctacaccttcacaagttaccatatacattgggtgaagcagaggcctggacagggacttgagtggattggatggatttatcctggaaatgttaatactgagtacaatgagaagttcaagggcaaggccacactgactgcagacaaatcgtccagcacagcctacatgcacctcagcagcctgacctctgaggactctgcggtctatttctgtgccagagaggagattacctatgctatggactactggggtcaaggaacctcagtcaccgtgtcctca

SEQ ID NO: 549 - DNA, 741 bp, synthetic construct
  misc_feature 1..741: note = HLA scFv binding domain
  source 1..741: mol_type = other DNA
caggtgcagctggtgcagtctggggctgaggtgaagaagcctgggtcctcagtgaaggtttcctgcaaggcttctggatacaccttcactagctatcatatacattgggtgcgccaggcccccggacaagggcttgagtggatgggatggatctaccctggcaatgttaacacagaatataatgagaagttcaagggcaaagccaccattaccgcggacaaatccacgagcacagcctacatggagctgagcagcctgagatctgaagacacggctgtgtattactgtgcgagggaggaaattacctacgctatggactactggggccagggaaccacagtcaccgtgtcctcaggcggaggtggaagcggagggggaggatctggcggcggaggaagcggaggcgagattgtattgacccagagcccaggcaccctgagcctctctccaggagagcgggccaccctcagttgtagatccagtcagagtattgtacacagtaatgggaacacctatttggaatggtatcagcagaaaccaggtcaagccccaagattgctcatctacaaagtctctaacagatttagtggtattccagacaggttcagcggttccggaagtggtactgatttcaccctcacgatctccaggctcgagccagaagatttcgccgtttattactgttttcaaggttcacatgtgccgcgcacattcggtgggggtactaaagtagaaatcaaa

SEQ ID NO: 550 - DNA, 741 bp, synthetic construct
  misc_feature 1..741: note = HLA scFv binding domain
  source 1..741: mol_type = other DNA
caggtgcagctggtgcagtctggggctgaggtgaagaagcctgggtcctcagtgaaggtttcctgcaaggcttctggatacaccttcactagctatcatatacattgggtgcgccaggcccccggacaagggcttgagtggatgggatggatctaccctggcaatgttaacacagaatataatgagaagttcaagggcaaagccaccattaccgcggacaaatccacgagcacagcctacatggagctgagcagcctgagatctgaagacacggctgtgtattactgtgcgagggaggaaattacctacgctatggactactggggccagggaaccacagtcaccgtgtcctcaggcggaggtggaagcggagggggaggatctggcggcggaggaagcggaggcgacattgtaatgacccagaccccactcagcctgcccgtcactccaggagagccggccagcatcagttgtagatccagtcagagtattgtacacagtaatgggaacacctatttggaatggtatctgcagaaaccaggtcaatccccacaattgctcatctacaaagtctctaacagatttagtggtgtaccagacaggttcagcggttccggaagtggtactgatttcaccctcaagatctccagggtcgaggcagaagatgtcggcgtttattactgttttcaaggttcacatgtgccgcgcacattcggtgggggtactaaagtagaaatcaaa

SEQ ID NO: 551 - DNA, 741 bp, synthetic construct
  misc_feature 1..741: note = HLA scFv binding domain
  source 1..741: mol_type = other DNA
gaggtgcagctggtggagtctgggggtgggctggtgaagcctgggggctcactgaggctttcctgcgcggcttctggatacaccttcactagctatcatatacattgggtgcgccaggcccccggaaaagggcttgagtgggtgggatggatctaccctggcaatgttaacacagaatataatgagaagttcaagggcagattcaccattagcagggacgattccaagaacacactctacctgcagatgaacagcctgaaaactgaagacacggctgtgtattactgtgcgagggaggaaattacctacgctatggactactggggccagggaaccacagtcaccgtgtcctcaggcggaggtggaagcggagggggaggatctggcggcggaggaagcggaggcgacattcaaatgacccagagcccatccagcctgagcgcatctgtaggtgaccgggtcaccatcacttgtagatccagtcagagtattgtacacagtaatgggaacacctatttggaatggtatcagcagaaaccaggtaaagccccaaaattgctcatctacaaagtctctaacagatttagtggtgtaccaagcaggttcagcggttccggaagtggtactgatttcaccctcacgatctcctctctccagccagaagatttcgccacttattactgttttcaaggttcacatgtgccgcgcacattcggtgggggtactaaagtagaaatcaaa

SEQ ID NO: 552 - DNA, 741 bp, synthetic construct
  misc_feature 1..741: note = HLA scFv binding domain
  source 1..741: mol_type = other DNA
caggtgcagctggtgcagtctggggctgaggtgaagaagcctgggtcctcagtgaaggtttcctgcaaggcttctggatacaccttcactagctatcatatacattgggtgcgccaggcccccggacaagggcttgagtggatcggatggatctaccctggcaatgttaacacagaatataatgagaagttcaagggcaaagccaccattaccgcggacgaatccacgaacacagcctacatggagctgagcagcctgagatctgaagacacggctgtgtattactgtgcgagggaggaaattacctacgctatggactactggggccagggaaccctggtcaccgtgtcctcaggcggaggtggaagcggagggggaggatctggcggcggaggaagcggaggcgacattcaaatgacccagagcccatccaccctgagcgcatctgtaggtgaccgggtcaccatcacttgtagatccagtcagagtattgtacacagtaatgggaacacctatttggaatggtatcagcagaaaccaggtaaagccccaaaattgctcatctacaaagtctctaacagatttagtggtgtaccagccaggttcagcggttccggaagtggtactgaattcaccctcacgatctcctctctccagccagatgatttcgccacttattactgttttcaaggttcacatgtgccgcgcacattcggtcagggtactaaagtagaagtcaaa

SEQ ID NO: 553 - DNA, 741 bp, synthetic construct
  misc_feature 1..741: note = HLA scFv binding domain
  source 1..741: mol_type = other DNA
caggtgcagctggtgcagtctggggctgaggtgaagaagcctgggtcctcagtgaaggtttcctgcaaggcttctggatacaccttcactagctatcatatgcattgggtgcgccaggcccccggacaagggcttgagtggatcggatacatctaccctggcaatgttaacacagaatataatgagaagttcaagggcaaagccacccttaccgcggacaaatccacgaacacagcctacatggagctgagcagcctgagatctgaagacacggctgtgtatttctgtgcgagggaggaaattacctacgctatggactactggggccagggaaccctggtcaccgtgtcctcaggcggaggtggaagcggagggggaggatctggcggcggaggaagcggaggcgacgttcaaatgacccagagcccatccaccctgagcgcatctgtaggtgaccgggtcaccatcacttgtagctccagtcagagtattgtacacagtaatgggaacacctatatggaatggtatcagcagaaaccaggtaaagccccaaaattgctcatctacaaagtctctaacagatttagtggtgtaccagacaggttcagcggttccggaagtggtactgaattcaccctcacgatctcctctctccagccagatgatttcgccacttattactgtcatcaaggttcacatgtgccgcgcacattcggtcagggtactaaagtagaagtcaaa

SEQ ID NO: 554 - DNA, 741 bp, synthetic construct
  misc_feature 1..741: note = HLA scFv binding domain
  source 1..741: mol_type = other DNA
caggtgcagctgcagcagtctgggcctgagctggtgaagcctggggcctcagtgaagatgtcctgcaaggcttctggatacaccttcactagctatcatatccagtgggtgaagcagaggcctggacaagggcttgagtggatcggatggatctaccctggcgatggtagtacacagtataatgagaagttcaagggcaaaaccacccttaccgcggacaaatcctccagcacagcctacatgttgctgagcagcctgacctctgaagactctgctatctatttctgtgcgagggaggggacctactacgctatggactactggggccagggaacctcagtcaccgtgtcctcaggcggaggtggaagcggagggggaggatctggcggcggaggaagcggaggcgatgttttgatgacccagactccactctccctgcctgtctctcttggagaccaagtctccatctcttgtagatccagtcagagtattgtacacagtaatgggaacacctatttagaatggtatctgcagaaaccaggtcagtctccaaagttgctcatctacaaagtctctaacagatttagtggtgtaccagacaggttcagcggttccggaagtggtactgatttcaccctcaagatctcgagagtggaggctgaggatctgggagtttattactgttttcaaggttcacatgtgccgcgcacattcggtggaggtactaaactggaaatcaaa

SEQ ID NO: 555 - DNA, 741 bp, synthetic construct
  misc_feature 1..741: note = HLA scFv binding domain
  source 1..741: mol_type = other DNA
cagctgcagctgcaggagtctgggcccgggctggtgaagccttcggaaacgctgagcctcacctgcacggtttctggatacaccttcaccagctatcatatccagtggatccgacagccccctggaaaagggcttgagtggatcggatggatctaccctggcgatggttcaacacagtacaatgagaagttcaagggcagagccacgattagcgtggacacatccaagaaccaattctccctgaacctggacagcgtgagtgctgcggacacggccatttattactgtgcgagagagggaacttactacgctatggactactggggcaaagggagcacggtcaccgtgtcctcaggcggaggtggaagcggagggggaggatctggcggcggaggaagcggaggcgacatccagatgacccagagcccaagctccctgagtgcgtccgtgggcgaccgcgtgaccatcacttgcagatcctctcagtccatcgtgcactccaacggcaacacgtacctcgagtggtaccagcagaagcccgggaaggccccgaaactgctcatctacaaggtgagcaaccggttctccggcgtccccagccgcttctcagggtccggctcggggacggatttcaccttcacgattagcagcttgcagcccgaagacatcgccacgtactactgctttcagggaagtcacgtgccgcgtaccttcgggccgggcacgaaagtggatattaag

SEQ ID NO: 556 - DNA, 741 bp, synthetic construct
  misc_feature 1..741: note = HLA scFv binding domain
  source 1..741: mol_type = other DNA
gaggtgcagctggtgcagtctggggccgagctgaagaagcctgggtcctcggtgaaggtgtcctgcaaggcttctggatacaccttcaccagctatcatatccagtgggtaaaacaggcccctggacaagggcttgagtggatcggatggatctaccctggcgatggttcaacacagtacaatgagaagttcaagggcaaagccacgcttaccgtggacaaatccacgaacacagcctacatggagctgagcagcctgagatctgaggacacggccgtatattactgtgcgagagagggaacttactacgctatggactactggggccaagggaccctggtcaccgtgtcctcaggcggaggtggaagcggagggggaggatctggcggcggaggaagcggaggcgacatccagatgacccagagcccatccaccctgagtgcgtccgtgggcgaccgcgtgaccatcacttgcagatcctctcagtccatcgtgcactccaacggcaacacgtacctcgagtggtaccagcagaagcccgggaaggccccgaaactgctcatctacaaggtgagcaaccggttctccggcgtccccagccgcttctcagggtccggctcggggacggatttcaccctcacgattagcagcttgcagcccgatgacttcgccacgtactactgctttcagggaagtcacgtgccgcgtaccttcgggcagggcacgaaagtggaagttaag

SEQ ID NO: 557 - DNA, 741 bp, synthetic construct
  misc_feature 1..741: note = HLA scFv binding domain
  source 1..741: mol_type = other DNA
caggtgcagctggtgcagtctggggccgaggtgaagaagcctgggtcctcggtgaaggtgtcctgcaaggcttctggatacaccttcaccagctatcatatccagtgggtacgacaggcccctggacaagggcttgagtggatgggatggatctaccctggcgatggttcaacacagtacaatgagaagttcaagggcagagtcacgattaccgcggacaaatccacgagcacagcctacatggagctgagcagcctgagatctgaggacacggccgtatattactgtgcgagagagggaacttactacgctatggactactggggccaagggaccacggtcaccgtgtcctcaggcggaggtggaagcggagggggaggatctggcggcggaggaagcggaggcgagatcgtcctgacccagagcccagggaccctgagtttgtccccgggcgagcgcgcgaccctcagttgcagatcctctcagtccatcgtgcactccaacggcaacacgtacctcgagtggtaccagcagaagcccgggcaggccccgcgactgctcatctacaaggtgagcaaccggttctccggcatccccgaccgcttctcagggtccggctcggggacggatttcaccctcacgattagccgcttggagcccgaagacttcgccgtgtactactgctttcagggaagtcacgtgccgcgtaccttcggggggggcacgaaagtggaaattaag

SEQ ID NO: 558 - DNA, 741 bp, synthetic construct
  misc_feature 1..741: note = HLA scFv binding domain
  source 1..741: mol_type = other DNA
caggtgaccctgaagcagtctggggccgaggtgaagaagcctgggtcctcggtgaaggtgtcctgcacggcttctggatacaccttcaccagctatcatgtcagctgggtacgacaggcccctggacaagggcttgagtggttgggaaggatctaccctggcgatggttcaacacagtacaatgagaagttcaagggcaaagtcacgattaccgcggacaaatccatggacacatccttcatggagctgaccagcctgacatctgaggacacggccgtatattactgtgcgagagagggaacttactacgctatggacctctggggccaagggaccctggtcaccgtgtcctcaggcggaggtggaagcggagggggaggatctggcggcggaggaagcggaggcgagatcgtcctgacccagagcccagggaccctgagtttgtccccgggcgagcgcgcgaccctcagttgcagatcctctcagtccatcgtgcactccaacggcaacacgtacctcgcgtggtaccagcagaagcccgggcaggccccgcgactgctcatctccaaggtgagcaaccggttctccggcgtccccgaccgcttctcagggtccggctcggggacggatttcaccctcacgattagccgcttggagcccgaagacttcgccgtgtactactgccaacagggaagtcacgtgccgcgtaccttcggggggggcacgaaagtggaaattaag

SEQ ID NO: 559 - DNA, 741 bp, synthetic construct
  misc_feature 1..741: note = HLA scFv binding domain
  source 1..741: mol_type = other DNA
caggtgcagctggtgcagtctggggccgaggtgaagaagcctggggcctcggtgaaggtgtcctgcaaggcttctggatacaccttcaccagctatcatatgcactgggtacgacaggcccctggacaaaggcttgagtggatgggatggatctaccctggcgatggttcaacacagtacaatgagaagttcaagggcaaagtcacgattacccgggacacatccgcgagcacagcctacatggagctgagcagcctgagatctgaggacacggccgtatattactgtgcgagagagggaacttactacgctatggactactggggccaagggaccctggtcaccgtgtcctcaggcggaggtggaagcggagggggaggatctggcggcggaggaagcggaggcgacatcgtcatgacccagaccccactgtccctgcctgtgaccccgggcgagcccgcgagcatcagttgcagatcctctcagtccatcgtgcactccaacggcaacacgtacctcgactggtacctgcagaagcccgggcagtccccgcaactgctcatctacaaggtgagcaaccggttctccggcgtccccgaccgcttctcagggtccggctcggggacggatttcaccctcaagattagccgcgtggaggccgaagacgtcggcgtgtactactgcatgcagggaagtcacgtgccgcgtaccttcggggggggcacgaaagtggaaattaag

SEQ ID NO: 560 - protein, 244 aa, synthetic construct
  REGION 1..244: note = HLA-B*07 antigen binding domain
QVQLQESGPGLVKPSQTLSLTCTVSGYSITSGYSWHWIRQPPGKGLEWIGYIHFSGSTHYHPSLKSRVTISVDTSKNQFSLKLSSVTAADTAVYYCARGGVVSHYAMDCWGQGTTVTVSSGGGGSGGGGSGGGGSGGDIQMTQSPSSLSASVGDRVTITCRASENIYSNLAWYQQKPGKAPKLLIYAATYLPDGVPSRFSGSGSGTDFTLTISSLQPEDFATYYCQHFWVTPYTFGGGTKVEIK

SEQ ID NO: 561 - protein, 244 aa, synthetic construct
  REGION 1..244: note = HLA-B*07 antigen binding domain
EVQLVESGGGLVKPGGSLRLSCAASGYSITSGYSWHWVRQAPGKGLEWVSYIHFSGSTHYHPSLKSRFTISRDNAKNSLYLQMNSLRAEDTAVYYCARGGVVSHYAMDCWGQGTTVTVSSGGGGSGGGGSGGGGSGGDIQMTQSPSSVSASVGDRVTITCRASENIYSNLAWYQQKPGKAPKLLIYAATYLPDGVPSRFSGSGSGTDFTLTISSLQPEDFATYYCQHFWVTPYTFGGGTKVEIK

SEQ ID NO: 562 - protein, 244 aa, synthetic construct
  REGION 1..244: note = HLA-B*07 antigen binding domain
EVQLVESGGGLVKPGGSLRLSCAASGYSITSGYSWHWVRQAPGKGLEWVGYIHFSGSTHYHPSLKSRFTISRDDSKNTLYLQMNSLKTEDTAVYYCARGGVVSHYAMDCWGQGTTVTVSSGGGGSGGGGSGGGGSGGEIVLTQSPATLSLSPGERATLSCRASENIYSNLAWYQQKPGQAPRLLIYAATYLPDGIPARFSGSGSGTDFTLTISSLEPEDFAVYYCQHFWVTPYTFGGGTKVEIK

SEQ ID NO: 563 - protein, 244 aa, synthetic construct
  REGION 1..244: note = HLA-B*07 antigen binding domain
QVQLQQSGPGLVKPSQTLSLTCAISGYSITSGYSWHWIRQSPSRGLEWLGYIHFSGSTHYHPSLKSRITINPDTSKNQFSLQLNSVTPEDTAVYYCARGGVVSHYAMDCWGQGTTVTVSSGGGGSGGGGSGGGGSGGEIVLTQSPATLSLSPGERATLSCRASENIYSNLAWYQQKPGQAPRLLIYAATYLPDGIPARFSGSGSGTDFTLTISRLEPEDFAVYYCQHFWVTPYTFGGGTKVEIK

SEQ ID NO: 564 - protein, 244 aa, synthetic construct
  REGION 1..244: note = HLA-B*07 antigen binding domain
EVQLVESGGGLVKPGGSLRLSCAASGYSITSGYSWHWVRQAPGKGLEWVGYIHFSGSTHYHPSLKSRFTISRDDSKNTLYLQMNSLKTEDTAVYYCARGGVVSHYAMDCWGQGTTVTVSSGGGGSGGGGSGGGGSGGDIQMTQSPSSVSASVGDRVTITCRASENIYSNLAWYQQKPGKAPKLLIYAATYLPDGVPSRFSGSGSGTDFTLTISSLQPEDFATYYCQHFWVTPYTFGGGTKVEIK

SEQ ID NO: 565 - protein, 244 aa, synthetic construct
  REGION 1..244: note = HLA-B*07 antigen binding domain
EVQLVESGGGLVQPGGSLRLSCAASGYSITSGYSWHWVRQAPGKGLEWVSYIHFSGSTHYHPSLKSRFTISRDNSKNTLYLQMNSLRAEDTAVYYCARGGVVSHYAMDCWGQGTTVTVSSGGGGSGGGGSGGGGSGGDIQMTQSPSSLSASVGDRVTITCRASENIYSNLAWYQQKPGKAPKLLIYAATYLPDGVPSRFSGSGSGTDFTLTISSLQPEDFATYYCQHFWVTPYTFGGGTKVEIK

SEQ ID NO: 566 - protein, 244 aa, synthetic construct
  REGION 1..244: note = HLA-B*07 antigen binding domain
EVQLVESGGGLVKPGGSLRLSCAASGYSITSGYSWHWVRQAPGKGLEWVGYIHFSGSTHYHPSLKSRFTISRDDSKNTLYLQMNSLKTEDTAVYYCARGGVVSHYAMDCWGQGTTVTVSSGGGGSGGGGSGGGGSGGDIQMTQSPSSLSASVGDRVTITCRASENIYSNLAWYQQKPGKAPKLLIYAATYLPDGVPSRFSGSGSGTDFTLTISSLQPEDFATYYCQHFWVTPYTFGGGTKVEIK

SEQ ID NO: 567 - protein, 244 aa, synthetic construct
  REGION 1..244: note = HLA-B*07 antigen binding domain
QVQLQQWGAGLLKPSETLSLTCAVYGYSITSGYSWHWIRQPPGKGLEWIGYIHFSGSTHYHPSLKSRVTISVDTSKNQFSLKLSSVTAADTAVYYCARGGVVSHYAMDCWGQGTTVTVSSGGGGSGGGGSGGGGSGGDIQMTQSPSSLSASVGDRVTITCRASENIYSNLAWYQQKPGKAPKLLIYAATYLPDGVPSRFSGSGSGTDFTLTISSLQPEDFATYYCQHFWVTPYTFGGGTKVEIK

SEQ ID NO: 568 - protein, 244 aa, synthetic construct
  REGION 1..244: note = HLA-B*07 antigen binding domain
QVQLQESGPGLVKPSQTLSLTCTVSGYSITSGYSWHWIRQHPGKGLEWIGYIHFSGSTHYHPSLKSRVTISVDTSKNQFSLKLSSVTAADTAVYYCARGGVVSHYAMDCWGQGTTVTVSSGGGGSGGGGSGGGGSGGDIQMTQSPSSLSASVGDRVTITCRASENIYSNLAWYQQKPGKAPKLLIYAATYLPDGVPSRFSGSGSGTDFTLTISSLQPEDFATYYCQHFWVTPYTFGGGTKVEIK

SEQ ID NO: 569 - protein, 244 aa, synthetic construct
  REGION 1..244: note = HLA-B*07 antigen binding domain
QVQLQQSGPGLVKPSQTLSLTCAISGYSITSGYSWHWIRQSPSRGLEWLGYIHFSGSTHYHPSLKSRITINPDTSKNQFSLQLNSVTPEDTAVYYCARGGVVSHYAMDCWGQGTTVTVSSGGGGSGGGGSGGGGSGGDIQMTQSPSSLSASVGDRVTITCRASENIYSNLAWYQQKPGKAPKLLIYAATYLPDGVPSRFSGSGSGTDFTLTISSLQPEDFATYYCQHFWVTPYTFGGGTKVEIK

SEQ ID NO: 570 - protein, 240 aa, synthetic construct
  REGION 1..240: note = HLA-C*07 antigen binding domain
EVQLLESGGGLVQPGGSLRLSCAASGFTFSSYAMSWVRQAPGKGLEWVSAISGSGGSTYYADSVKGRFTISRDNSKNTLYLQMNSLRAEDTAVYYCAVSFDWFDPWGQGTLVTVSSGGGGSGGGGSGGGGSGGDIQMTQSPSSLSASVGDRVTITCRASQSISSYLNWYQQKPGKAPKLLIYAASSLQSGVPSRFSGSGSGTDFTLTISSLQPEDFATYYCQQSYSTPLTFGGGTKVEIK

SEQ ID NO: 571 - protein, 248 aa, synthetic construct
  REGION 1..248: note = HLA-C*07 antigen binding domain
QVQLQESGPGLVKPSQTLSLTCTVSGGSISSGGYYWSWIRQPPGKGLEWIGYIYYSGSTYYNPSLKSRVTISVDTSKNQFSLKLSSVTAADTAVYYCARERSISPYYYYYMDVWGKGTTVTVSSGGGGSGGGGSGGGGSGGDIQMTQSPSSLSASVGDRVTITCRASQSISSYLNWYQQKPGKAPKLLIYAASSLQSGVPSRFSGSGSGTDFTLTISSLQPEDFATYYCQQSYSTPLTFGGGTKVEIK

SEQ ID NO: 572 - protein, 247 aa, synthetic construct
  REGION 1..247: note = HLA-C*07 antigen binding domain
QLQLQESGPGLVKPSETLSLTCTVSGGSISSSSYYWGWIRQPPGKGLEWIGSIYYSGSTYYNPSLKSRVTISVDTSKNQFSLKLSSVTAADTAVYYCARDSVIWYWFDPWGQGTLVTVSSGGGGSGGGGSGGGGSGGQSVLTQPPSASGTPGQRVTISCSGSSSNIGSNTVNWYQQLPGTAPKLLIYSNNQRPSGVPDRFSGSKSGTSASLAISGLQSEDEADYYCAAWDDSLNGWVFGGGTKLTVL

SEQ ID NO: 573 - protein, 249 aa, synthetic construct
  REGION 1..249: note = HLA-C*07 antigen binding domain
QVQLQESGPGLVKPSQTLSLTCTVSGGSISSGGYYWSWIRQPPGKGLEWIGYIYYSGSTYYNPSLKSRVTISVDTSKNQFSLKLSSVTAADTAVYYCAREEILPRLSYYYYMDVWGKGTTVTVSSGGGGSGGGGSGGGGSGGDIQMTQSPSSLSASVGDRVTITCRASQSISSYLNWYQQKPGKAPKLLIYAASSLQSGVPSRFSGSGSGTDFTLTISSLQPEDFATYYCQQSYSTPLTFGGGTKVEIK

SEQ ID NO: 574 - protein, 245 aa, synthetic construct
  REGION 1..245: note = HLA-C*07 antigen binding domain
QVQLVQSGSELKKPGASVKVSCKASGYTFTSYAMNWVRQAPGQGLEWMGWINTNTGNPTYAQGFTGRFVFSFDTSVSTAYLQICSLKAEDTAVYYCARGGRAHSSWYFDLWGRGTLVTVSSGGGGSGGGGSGGGGSGGDIQMTQSPSSLSASVGDRVTITCRASQSISSYLNWYQQKPGKAPKLLIYAASSLQSGVPSRFSGSGSGTDFTLTISSLQPEDFATYYCQQSYSTPLTFGGGTKVEIK

SEQ ID NO: 575 - protein, 251 aa, synthetic construct
  REGION 1..251: note = HLA-C*07 antigen binding domain
QVQLQESGPGLVKPSQTLSLTCTVSGGSISSGGYYWSWIRQPPGKGLEWIGYIYYSGSTYYNPSLKSRVTISVDTSKNQFSLKLSSVTAADTAVYYCARDRIKILPRLGYYYYMDVWGKGTTVTVSSGGGGSGGGGSGGGGSGGDIQMTQSPSSLSASVGDRVTITCRASQSISSYLNWYQQKPGKAPKLLIYAASSLQSGVPSRFSGSGSGTDFTLTISSLQPEDFATYYCQQSYSTPLTFGGGTKVEIK

SEQ ID NO: 576 - protein, 246 aa, synthetic construct
  REGION 1..246: note = HLA-C*07 antigen binding domain
QVQLQESGPGLVKPSQTLSLTCTVSGGSISSGGYYWSWIRQPPGKGLEWIGYIYYSGSTYYNPSLKSRVTISVDTSKNQFSLKLSSVTAADTAVYYCARDTVIHYYYYMDVWGKGTTVTVSSGGGGSGGGGSGGGGSGGDIQMTQSPSSLSASVGDRVTITCRASQSISSYLNWYQQKPGKAPKLLIYAASSLQSGVPSRFSGSGSGTDFTLTISSLQPEDFATYYCQQSYSTPLTFGGGTKVEIK

SEQ ID NO: 577 - protein, 250 aa, synthetic construct
  REGION 1..250: note = HLA-C*07 antigen binding domain
QVQLQESGPGLVKPSQTLSLTCTVSGGSISSGGYYWSWIRQPPGKGLEWIGYIYYSGSTYYNPSLKSRVTISVDTSKNQFSLKLSSVTAADTAVYYCARDVIVEVFLSYYYYMDVWGKGTTVTVSSGGGGSGGGGSGGGGSGGDIQMTQSPSSLSASVGDRVTITCRASQSISSYLNWYQQKPGKAPKLLIYAASSLQSGVPSRFSGSGSGTDFTLTISSLQPEDFATYYCQQSYSTPLTFGGGTKVEIK

SEQ ID NO: 578 - protein, 246 aa, synthetic construct
  REGION 1..246: note = HLA-C*07 antigen binding domain
QVQLQESGPGLVKPSQTLSLTCTVSGGSISSGGYYWSWIRQPPGKGLEWIGYIYYSGSTYYNPSLKSRVTISVDTSKNQFSLKLSSVTAADTAVYYCARDIFIHYYYYMDVWGKGTTVTVSSGGGGSGGGGSGGGGSGGDIQMTQSPSSLSASVGDRVTITCRASQSISSYLNWYQQKPGKAPKLLIYAASSLQSGVPSRFSGSGSGTDFTLTISSLQPEDFATYYCQQSYSTPLTFGGGTKVEIK

SEQ ID NO: 579 - protein, 247 aa, synthetic construct
  REGION 1..247: note = HLA-C*07 antigen binding domain
EVQLVESGGGLVQPGGSLRLSCAASGFTFSSYSMNWVRQAPGKGLEWVSYISSSSSTIYYADSVKGRFTISRDNAKNSLYLQMNSLRAEDTAVYYCARDGTFYSYSPYYFDYWGQGTLVTVSSGGGGSGGGGSGGGGSGGDIQMTQSPSSLSASVGDRVTITCRASQSISSYLNWYQQKPGKAPKLLIYAASSLQSGVPSRFSGSGSGTDFTLTISSLQPEDFATYYCQQSYSTPLTFGGGTKVEIK

SEQ ID NO: 580 - protein, 251 aa, synthetic construct
  REGION 1..251: note = HLA-C*07 antigen binding domain
QVQLQESGPGLVKPSQTLSLTCTVSGGSISSGGYYWSWIRQPPGKGLEWIGYIYYSGSTYYNPSLKSRVTISVDTSKNQFSLKLSSVTAADTAVYYCAREWIKILPRLGYYYYMDVWGKGTTVTVSSGGGGSGGGGSGGGGSGGDIQMTQSPSSLSASVGDRVTITCRASQSISSYLNWYQQKPGKAPKLLIYAASSLQSGVPSRFSGSGSGTDFTLTISSLQPEDFATYYCQQSYSTPLTFGGGTKVEIK

SEQ ID NO: 581 - protein, 246 aa, synthetic construct
  REGION 1..246: note = HLA-C*07 antigen binding domain
QVQLQESGPGLVKPSQTLSLTCTVSGGSISSGGYYWSWIRQPPGKGLEWIGYIYYSGSTYYNPSLKSRVTISVDTSKNQFSLKLSSVTAADTAVYYCARDRSLYYYYYMDVWGKGTTVTVSSGGGGSGGGGSGGGGSGGDIQMTQSPSSLSASVGDRVTITCRASQSISSYLNWYQQKPGKAPKLLIYAASSLQSGVPSRFSGSGSGTDFTLTISSLQPEDFATYYCQQSYSTPLTFGGGTKVEIK

SEQ ID NO: 582 - protein, 248 aa, synthetic construct
  REGION 1..248: note = HLA-C*07 antigen binding domain
QVQLQESGPGLVKPSQTLSLTCTVSGGSISSGGYYWSWIRQPPGKGLEWIGYIYYSGSTYYNPSLKSRVTISVDTSKNQFSLKLSSVTAADTAVYYCARDKILAPNYYYYMDVWGKGTTVTVSSGGGGSGGGGSGGGGSGGDIQMTQSPSSLSASVGDRVTITCRASQSISSYLNWYQQKPGKAPKLLIYAASSLQSGVPSRFSGSGSGTDFTLTISSLQPEDFATYYCQQSYSTPLTFGGGTKVEIK

SEQ ID NO: 583 - protein, 250 aa, synthetic construct
  REGION 1..250: note = HLA-C*07 antigen binding domain
QVQLQESGPGLVKPSQTLSLTCTVSGGSISSGGYYWSWIRQPPGKGLEWIGYIYYSGSTYYNPSLKSRVTISVDTSKNQFSLKLSSVTAADTAVYYCAREKSWKYFYYYYYYMDVWGKGTTVTVSSGGGGSGGGGSGGGGSGGDIQMTQSPSSLSASVGDRVTITCRASQSISSYLNWYQQKPGKAPKLLIYAASSLQSGVPSRFSGSGSGTDFTLTISSLQPEDFATYYCQQSYSTPLTFGGGTKVEIK

SEQ ID NO: 584 - protein, 249 aa, synthetic construct
  REGION 1..249: note = HLA-C*07 antigen binding domain
QVQLQESGPGLVKPSQTLSLTCTVSGGSISSGGYYWSWIRQPPGKGLEWIGYIYYSGSTYYNPSLKSRVTISVDTSKNQFSLKLSSVTAADTAVYYCARENTSTIPYYYYYMDVWGKGTTVTVSSGGGGSGGGGSGGGGSGGDIQMTQSPSSLSASVGDRVTITCRASQSISSYLNWYQQKPGKAPKLLIYAASSLQSGVPSRFSGSGSGTDFTLTISSLQPEDFATYYCQQSYSTPLTFGGGTKVEIK

SEQ ID NO: 585 - protein, 253 aa, synthetic construct
  REGION 1..253: note = HLA-C*07 antigen binding domain
QVQLQESGPGLVKPSQTLSLTCTVSGGSISSGGYYWSWIRQPPGKGLEWIGYIYYSGSTYYNPSLKSRVTISVDTSKNQFSLKLSSVTAADTAVYYCAREDVDKNTSTIYYYYYYMDVWGKGTTVTVSSGGGGSGGGGSGGGGSGGDIQMTQSPSSLSASVGDRVTITCRASQSISSYLNWYQQKPGKAPKLLIYAASSLQSGVPSRFSGSGSGTDFTLTISSLQPEDFATYYCQQSYSTPLTFGGGTKVEIK

SEQ ID NO: 586 - protein, 250 aa, synthetic construct
  REGION 1..250: note = HLA-C*07 antigen binding domain
QVQLVESGGGLVKPGGSLRLSCAASGFTFSDYYMSWIRQAPGKGLEWVSYISSSGSTIYYADSVKGRFTISRDNAKNSLYLQMNSLRAEDTAVYYCARDGGDIVSSSAIYWYFDLWGRGTLVTVSSGGGGSGGGGSGGGGSGGAIQLTQSPSSLSASVGDRVTITCRASQGISSALAWYQQKPGKAPKLLIYDASSLESGVPSRFSGSGSGTDFTLTISSLQPEDFATYYCQQFNSYPLTFGGGTKVEIK

SEQ ID NO: 587 - protein, 248 aa, synthetic construct
  REGION 1..248: note = HLA-C*07 antigen binding domain
QVQLQESGPGLVKPSQTLSLTCTVSGGSISSGGYYWSWIRQPPGKGLEWIGYIYYSGSTYYNPSLKSRVTISVDTSKNQFSLKLSSVTAADTAVYYCARDLILPPYYYYYMDVWGKGTTVTVSSGGGGSGGGGSGGGGSGGDIQMTQSPSSLSASVGDRVTITCRASQSISSYLNWYQQKPGKAPKLLIYAASSLQSGVPSRFSGSGSGTDFTLTISSLQPEDFATYYCQQSYSTPLTFGGGTKVEIK

SEQ ID NO: 588 - protein, 253 aa, synthetic construct
  REGION 1..253: note = HLA-C*07 antigen binding domain
QVQLQESGPGLVKPSQTLSLTCTVSGGSISSGGYYWSWIRQPPGKGLEWIGYIYYSGSTYYNPSLKSRVTISVDTSKNQFSLKLSSVTAADTAVYYCARETWIKILPRYYYYYYYMDVWGKGTTVTVSSGGGGSGGGGSGGGGSGGDIQMTQSPSSLSASVGDRVTITCRASQSISSYLNWYQQKPGKAPKLLIYAASSLQSGVPSRFSGSGSGTDFTLTISSLQPEDFATYYCQQSYSTPLTFGGGTKVEIK

SEQ ID NO: 589 - protein, 246 aa, synthetic construct
  REGION 1..246: note = HLA-C*07 antigen binding domain
QVQLQESGPGLVKPSQTLSLTCTVSGGSISSGGYYWSWIRQPPGKGLEWIGYIYYSGSTYYNPSLKSRVTISVDTSKNQFSLKLSSVTAADTAVYYCARDLSRYYYYYMDVWGKGTTVTVSSGGGGSGGGGSGGGGSGGDIQMTQSPSSLSASVGDRVTITCRASQSISSYLNWYQQKPGKAPKLLIYAASSLQSGVPSRFSGSGSGTDFTLTISSLQPEDFATYYCQQSYSTPLTFGGGTKVEIK

SEQ ID NO: 590 - protein, 242 aa, synthetic construct
  REGION 1..242: note = HLA-C*07 antigen binding domain
EVQLVESGGGLVQPGGSLRLSCAASGFTFSSYSMNWVRQAPGKGLEWVSYISSSSSTIYYADSVKGRFTISRDNAKNSLYLQMNSLRAEDTAVYYCAREHIVLCFDYWGQGTLVTVSSGGGGSGGGGSGGGGSGGDIQMTQSPSSLSASVGDRVTITCRASQGISSWLAWYQQKPEKAPKSLIYAASSLQSGVPSRFSGSGSGTDFTLTISSLQPEDFATYYCQQYNSYPLTFGGGTKVEIK

SEQ ID NO: 591 - protein, 249 aa, synthetic construct
  REGION 1..249: note = HLA-C*07 antigen binding domain
QVQLQESGPGLVKPSQTLSLTCTVSGGSISSGGYYWSWIRQPPGKGLEWIGYIYYSGSTYYNPSLKSRVTISVDTSKNQFSLKLSSVTAADTAVYYCARDKILPRPYYYYYMDVWGKGTTVTVSSGGGGSGGGGSGGGGSGGDIQMTQSPSSLSASVGDRVTITCRASQSISSYLNWYQQKPGKAPKLLIYAASSLQSGVPSRFSGSGSGTDFTLTISSLQPEDFATYYCQQSYSTPLTFGGGTKVEIK

SEQ ID NO: 592 - protein, 244 aa, synthetic construct
  REGION 1..244: note = HLA-C*07 antigen binding domain
QVQLVQSGAEVKKPGASVKVSCKASGYTFTSYGISWVRQAPGQGLEWMGWISAYNGNTNYAQKLQGRVTMTTDTSTSTAYMELRSLRSDDTAVYYCARGSNEYFQHWGQGTLVTVSSGGGGSGGGGSGGGGSGGQSALTQPPSASGSPGQSVTISCTGTSSDVGGYNYVSWYQQHPGKAPKLMIYEVSKRPSGVPDRFSGSKSGNTASLTVSGLQAEDEADYYCSSYAGSNNWVFGGGTKLTVL

SEQ ID NO: 593 - protein, 242 aa, synthetic construct
  REGION 1..242: note = HLA-C*07 antigen binding domain
QVQLVQSGSELKKPGASVKVSCKASGYTFTSYAMNWVRQAPGQGLEWMGWINTNTGNPTYAQGFTGRFVFSFDTSVSTAYLQICSLKAEDTAVYYCARGTSYWYFDLWGRGTLVTVSSGGGGSGGGGSGGGGSGGDIQMTQSPSSLSASVGDRVTITCRASQSISSYLNWYQQKPGKAPKLLIYAASSLQSGVPSRFSGSGSGTDFTLTISSLQPEDFATYYCQQSYSTPLTFGGGTKVEIK

SEQ ID NO: 594 - protein, 248 aa, synthetic construct
  REGION 1..248: note = HLA-C*07 antigen binding domain
QVQLQESGPGLVKPSQTLSLTCTVSGGSISSGGYYWSWIRQPPGKGLEWIGYIYYSGSTYYNPSLKSRVTISVDTSKNQFSLKLSSVTAADTAVYYCAREEIVEVFYYYYMDVWGKGTTVTVSSGGGGSGGGGSGGGGSGGDIQMTQSPSSLSASVGDRVTITCRASQSISSYLNWYQQKPGKAPKLLIYAASSLQSGVPSRFSGSGSGTDFTLTISSLQPEDFATYYCQQSYSTPLTFGGGTKVEIK

SEQ ID NO: 595 - protein, 241 aa, synthetic construct
  REGION 1..241: note = HLA-C*07 antigen binding domain
EVQLLESGGGLVQPGGSLRLSCAASGFTFSSYAMSWVRQAPGKGLEWVSAISGSGGSTYYADSVKGRFTISRDNSKNTLYLQMNSLRAEDTAVYYCAKVDDYYFDYWGQGTLVTVSSGGGGSGGGGSGGGGSGGDIQMTQSPSSLSASVGDRVTITCRASQSISSYLNWYQQKPGKAPKLLIYAASSLQSGVPSRFSGSGSGTDFTLTISSLQPEDFATYYCQQSYSTPLTFGGGTKVEIK

SEQ ID NO: 596 - protein, 247 aa, synthetic construct
  REGION 1..247: note = HLA-C*07 antigen binding domain
EVQLVESGGGLVQPGGSLRLSCAASGFTFSSYWMHWVRQAPGKGLVWVSRINSDGSSTSYADSVKGRFTISRDNAKNTLYLQMNSLRAEDTAVYYCAWSTNILLSYTKAFDIWGQGTMVTVSSGGGGSGGGGSGGGGSGGDIQMTQSPSSLSASVGDRVTITCRASQSISSYLNWYQQKPGKAPKLLIYAASSLQSGVPSRFSGSGSGTDFTLTISSLQPEDFATYYCQQSYSTPLTFGGGTKVEIK

SEQ ID NO: 597 - protein, 246 aa, synthetic construct
  REGION 1..246: note = HLA-C*07 antigen binding domain
QVQLQESGPGLVKPSQTLSLTCTVSGGSISSGGYYWSWIRQPPGKGLEWIGYIYYSGSTYYNPSLKSRVTISVDTSKNQFSLKLSSVTAADTAVYYCARDKTYYYYYYMDVWGKGTTVTVSSGGGGSGGGGSGGGGSGGDIQMTQSPSSLSASVGDRVTITCRASQSISSYLNWYQQKPGKAPKLLIYAASSLQSGVPSRFSGSGSGTDFTLTISSLQPEDFATYYCQQSYSTPLTFGGGTKVEIK

SEQ ID NO: 598 - protein, 253 aa, synthetic construct
  REGION 1..253: note = HLA-C*07 antigen binding domain
QVQLQESGPGLVKPSQTLSLTCTVSGGSISSGGYYWSWIRQPPGKGLEWIGYIYYSGSTYYNPSLKSRVTISVDTSKNQFSLKLSSVTAADTAVYYCAREKYFHDKYFHDYYYYYMDVWGKGTTVTVSSGGGGSGGGGSGGGGSGGDIQMTQSPSSLSASVGDRVTITCRASQSISSYLNWYQQKPGKAPKLLIYAASSLQSGVPSRFSGSGSGTDFTLTISSLQPEDFATYYCQQSYSTPLTFGGGTKVEIK

SEQ ID NO: 599 - protein, 246 aa, synthetic construct
  REGION 1..246: note = HLA-C*07 antigen binding domain
QVQLQESGPGLVKPSQTLSLTCTVSGGSISSGGYYWSWIRQPPGKGLEWIGYIYYSGSTYYNPSLKSRVTISVDTSKNQFSLKLSSVTAADTAVYYCARDTSVYYYYYMDVWGKGTTVTVSSGGGGSGGGGSGGGGSGGDIQMTQSPSSLSASVGDRVTITCRASQSISSYLNWYQQKPGKAPKLLIYAASSLQSGVPSRFSGSGSGTDFTLTISSLQPEDFATYYCQQSYSTPLTFGGGTKVEIK

SEQ ID NO: 600 - protein, 248 aa, synthetic construct
  REGION 1..248: note = HLA-C*07 antigen binding domain
QVQLQESGPGLVKPSQTLSLTCTVSGGSISSGGYYWSWIRQPPGKGLEWIGYIYYSGSTYYNPSLKSRVTISVDTSKNQFSLKLSSVTAADTAVYYCAREKILPYYYYYYMDVWGKGTTVTVSSGGGGSGGGGSGGGGSGGDIQMTQSPSSLSASVGDRVTITCRASQSISSYLNWYQQKPGKAPKLLIYAASSLQSGVPSRFSGSGSGTDFTLTISSLQPEDFATYYCQQSYSTPLTFGGGTKVEIK

SEQ ID NO: 601 - protein, 257 aa, synthetic construct
  REGION 1..257: note = HLA-C*07 antigen binding domain
EVQLVESGGGLVQPGGSLRLSCAASGFTFSSYSMNWVRQAPGKGLEWVSYISSSSSTIYYADSVKGRFTISRDNAKNSLYLQMNSLRAEDTAVYYCAIQWIYIYINPRGFIFLHDAFDIWGQGTMVTVSSGGGGSGGGGSGGGGSGGQSVLTQPPSASGTPGQRVTISCSGSSSNIGSNTVNWYQQLPGTAPKLLIYSNNQRPSGVPDRFSGSKSGTSASLAISGLQSEDEADYYCAAWDDSLNGWVFGGGTKLTVL

SEQ ID NO: 602 - protein, 248 aa, synthetic construct
  REGION 1..248: note = HLA-C*07 antigen binding domain
QVQLQQSGPGLVKPSQTLSLTCAISGDSVSSNSAAWNWIRQSPSRGLEWLGRTYYRSKWYNDYAVSVKSRITINPDTSKNQFSLQLNSVTPEDTAVYYCAKEDVDFHHDAFDIWGQGTMVTVSSGGGGSGGGGSGGGGSGGDIQMTQSPSSLSASVGDRVTITCRASQSISSYLNWYQQKPGKAPKLLIYAASSLQSGVPSRFSGSGSGTDFTLTISSLQPEDFATYYCQQSYSTPLTFGGGTKVEIK

SEQ ID NO: 603 - protein, 253 aa, synthetic construct
  REGION 1..253: note = HLA-C*07 antigen binding domain
QVQLQESGPGLVKPSQTLSLTCTVSGGSISSGGYYWSWIRQPPGKGLEWIGYIYYSGSTYYNPSLKSRVTISVDTSKNQFSLKLSSVTAADTAVYYCAREGVDKNTSTIYYYYYYMDVWGKGTTVTVSSGGGGSGGGGSGGGGSGGDIQMTQSPSSLSASVGDRVTITCRASQSISSYLNWYQQKPGKAPKLLIYAASSLQSGVPSRFSGSGSGTDFTLTISSLQPEDFATYYCQQSYSTPLTFGGGTKVEIK

SEQ ID NO: 604 - protein, 241 aa, synthetic construct
  REGION 1..241: note = HLA-C*07 antigen binding domain
EVQLVESGGGLVQPGGSLRLSCAASGFTFSSYSMNWVRQAPGKGLEWVSYISSSSSTIYYADSVKGRFTISRDNAKNSLYLQMNSLRAEDTAVYYCARDRRGYFDLWGRGTLVTVSSGGGGSGGGGSGGGGSGGDIQMTQSPSSLSASVGDRVTITCRASQGISSWLAWYQQKPEKAPKSLIYAASSLQSGVPSRFSGSGSGTDFTLTISSLQPEDFATYYCQQYNSYPLTFGGGTKVEIK

SEQ ID NO: 605 - protein, 248 aa, synthetic construct
  REGION 1..248: note = HLA-C*07 antigen binding domain
EVQLVQSGAEVKKPGATVKISCKVSGYTFTDYYMHWVQQAPGKGLEWMGLVDPEDGETIYAEKFQGRVTITADTSTDTAYMELSSLRSEDTAVYYCATGIHVDIRSMEDWFDPWGQGTLVTVSSGGGGSGGGGSGGGGSGGDIQMTQSPSSLSASVGDRVTITCRASQSISSYLNWYQQKPGKAPKLLIYAASSLQSGVPSRFSGSGSGTDFTLTISSLQPEDFATYYCQQSYSTPLTFGGGTKVEIK

SEQ ID NO: 606 - protein, 246 aa, synthetic construct
  REGION 1..246: note = HLA-C*07 antigen binding domain
QVQLQESGPGLVKPSQTLSLTCTVSGGSISSGGYYWSWIRQPPGKGLEWIGYIYYSGSTYYNPSLKSRVTISVDTSKNQFSLKLSSVTAADTAVYYCARDIGTSYYYYMDVWGKGTTVTVSSGGGGSGGGGSGGGGSGGDIQMTQSPSSLSASVGDRVTITCRASQSISSYLNWYQQKPGKAPKLLIYAASSLQSGVPSRFSGSGSGTDFTLTISSLQPEDFATYYCQQSYSTPLTFGGGTKVEIK

SEQ ID NO: 607 - protein, 249 aa, synthetic construct
  REGION 1..249: note = HLA-C*07 antigen binding domain
QVQLQESGPGLVKPSQTLSLTCTVSGGSISSGGYYWSWIRQPPGKGLEWIGYIYYSGSTYYNPSLKSRVTISVDTSKNQFSLKLSSVTAADTAVYYCAREVVEVFLYYYYYMDVWGKGTTVTVSSGGGGSGGGGSGGGGSGGDIQMTQSPSSLSASVGDRVTITCRASQSISSYLNWYQQKPGKAPKLLIYAASSLQSGVPSRFSGSGSGTDFTLTISSLQPEDFATYYCQQSYSTPLTFGGGTKVEIK

SEQ ID NO: 608 - protein, 246 aa, synthetic construct
  REGION 1..246: note = HLA-C*07 antigen binding domain
QVQLQESGPGLVKPSQTLSLTCTVSGGSISSGGYYWSWIRQPPGKGLEWIGYIYYSGSTYYNPSLKSRVTISVDTSKNQFSLKLSSVTAADTAVYYCARDLYYYYYYYMDVWGKGTTVTVSSGGGGSGGGGSGGGGSGGDIQMTQSPSSLSASVGDRVTITCRASQSISSYLNWYQQKPGKAPKLLIYAASSLQSGVPSRFSGSGSGTDFTLTISSLQPEDFATYYCQQSYSTPLTFGGGTKVEIK

SEQ ID NO: 609 - protein, 256 aa, synthetic construct
  REGION 1..256: note = HLA-C*07 antigen binding domain
QVQLQESGPGLVKPSQTLSLTCTVSGGSISSGGYYWSWIRQPPGKGLEWIGYIYYSGSTYYNPSLKSRVTISVDTSKNQFSLKLSSVTAADTAVYYCARESWKYFYPRGSIFIHYYYYMDVWGKGTTVTVSSGGGGSGGGGSGGGGSGGDIQMTQSPSSLSASVGDRVTITCRASQSISSYLNWYQQKPGKAPKLLIYAASSLQSGVPSRFSGSGSGTDFTLTISSLQPEDFATYYCQQSYSTPLTFGGGTKVEIK

SEQ ID NO: 610 - protein, 248 aa, synthetic construct
  REGION 1..248: note = HLA-C*07 antigen binding domain
QVQLQESGPGLVKPSQTLSLTCTVSGGSISSGGYYWSWIRQPPGKGLEWIGYIYYSGSTYYNPSLKSRVTISVDTSKNQFSLKLSSVTAADTAVYYCARDRIVEVFYYYYMDVWGKGTTVTVSSGGGGSGGGGSGGGGSGGDIQMTQSPSSLSASVGDRVTITCRASQSISSYLNWYQQKPGKAPKLLIYAASSLQSGVPSRFSGSGSGTDFTLTISSLQPEDFATYYCQQSYSTPLTFGGGTKVEIK

SEQ ID NO: 611 - protein, 250 aa, synthetic construct
  REGION 1..250: note = HLA-C*07 antigen binding domain
QVQLQESGPGLVKPSQTLSLTCTVSGGSISSGGYYWSWIRQPPGKGLEWIGYIYYSGSTYYNPSLKSRVTISVDTSKNQFSLKLSSVTAADTAVYYCAREKYFHDWLYYYYYMDVWGKGTTVTVSSGGGGSGGGGSGGGGSGGDIQMTQSPSSLSASVGDRVTITCRASQSISSYLNWYQQKPGKAPKLLIYAASSLQSGVPSRFSGSGSGTDFTLTISSLQPEDFATYYCQQSYSTPLTFGGGTKVEIK

SEQ ID NO: 612 - protein, 250 aa, synthetic construct
  REGION 1..250: note = HLA-C*07 antigen binding domain
QVQLQESGPGLVKPSQTLSLTCTVSGGSISSGGYYWSWIRQPPGKGLEWIGYIYYSGSTYYNPSLKSRVTISVDTSKNQFSLKLSSVTAADTAVYYCARDLVDKNTSYYYYYMDVWGKGTTVTVSSGGGGSGGGGSGGGGSGGDIQMTQSPSSLSASVGDRVTITCRASQSISSYLNWYQQKPGKAPKLLIYAASSLQSGVPSRFSGSGSGTDFTLTISSLQPEDFATYYCQQSYSTPLTFGGGTKVEIK

SEQ ID NO: 613 - protein, 244 aa, synthetic construct
  REGION 1..244: note = HLA-C*07 antigen binding domain
QVQLVQSGAEVKKPGASVKVSCKASGYTFTSYGISWVRQAPGQGLEWMGWISAYNGNTNYAQKLQGRVTMTTDTSTSTAYMELRSLRSDDTAVYYCARVQNEYFQHWGQGTLVTVSSGGGGSGGGGSGGGGSGGQSALTQPPSASGSPGQSVTISCTGTSSDVGGYNYVSWYQQHPGKAPKLMIYEVSKRPSGVPDRFSGSKSGNTASLTVSGLQAEDEADYYCSSYAGSNNWVFGGGTKLTVL

SEQ ID NO: 614 - protein, 239 aa, synthetic construct
  REGION 1..239: note = HLA-C*07 antigen binding domain
QVQLVESGGGLVKPGGSLRLSCAASGFTFSDYYMSWIRQAPGKGLEWVSYISSSGSTIYYADSVKGRFTISRDNAKNSLYLQMNSLRAEDTAVYYCATANWFDPWGQGTLVTVSSGGGGSGGGGSGGGGSGGDIQMTQSPSSVSASVGDRVTITCRASQGISSWLAWYQQKPGKAPKLLIYAASSLQSGVPSRFSGSGSGTDFTLTISSLQPEDFATYYCQQANSFPLTFGGGTKVEIK

SEQ ID NO: 615 - protein, 244 aa, synthetic construct
  REGION 1..244: note = HLA-A*03 scFv
QVQLVQSGAEVKKPGASVKVSCKASGYTFTSYGISWVRQAPGQGLEWMGWISAYNGNTNYAQKLQGRVTMTTDTSTSTAYMELRSLRSDDTAVYYCARERVSQRGAFDIWGQGTMVTVSSGGGGSGGGGSGGGGSGGDIQMTQSPSSLSASVGDRVTITCRASQSISSYLNWYQQKPGKAPKLLIYAASSLQSGVPSRFSGSGSGTDFTLTISSLQPEDFATYYCQQSYSTPLTFGGGTKVEIK

SEQ ID NO: 616 - protein, 243 aa, synthetic construct
  REGION 1..243: note = HLA-A*03 scFv
EVQLVESGGGLVQPGGSLRLSCAASGFTFSSYSMNWVRQAPGKGLEWVSYISSSSSTIYYADSVKGRFTISRDNAKNSLYLQMNSLRAEDTAVYYCARGNPDKDPFDYWGQGTLVTVSSGGGGSGGGGSGGGGSGGDIQMTQSPSSLSASVGDRVTITCRASQSISSYLNWYQQKPGKAPKLLIYAASSLQSGVPSRFSGSGSGTDFTLTISSLQPEDFATYYCQQSYSTPLTFGGGTKVEIK

SEQ ID NO: 617 - protein, 245 aa, synthetic construct
  REGION 1..245: note = HLA-A*03 scFv
QVQLQESGPGLVKPSETLSLTCTVSGGSVSSGSYYWSWIRQPPGKGLEWIGYIYYSGSTNYNPSLKSRVTISVDTSKNQFSLKLSSVTAADTAVYYCARDFYCTNWYFDLWGRGTLVTVSSGGGGSGGGGSGGGGSGGDIQMTQSPSSLSASVGDRVTITCRASQSISSYLNWYQQKPGKAPKLLIYAASSLQSGVPSRFSGSGSGTDFTLTISSLQPEDFATYYCQQSYSTPLTFGGGTKVEIK

SEQ ID NO: 618 - protein, 244 aa, synthetic construct
  REGION 1..244: note = HLA-A*03 scFv
QVQLQESGPGLVKPSETLSLTCTVSGGSISSYYWSWIRQPPGKGLEWIGYIYYSGSTNYNPSLKSRVTISVDTSKNQFSLKLSSVTAADTAVYYCARESSSGSYWYFDLWGRGTLVTVSSGGGGSGGGGSGGGGSGGDIQMTQSPSSLSASVGDRVTITCRASQSISSYLNWYQQKPGKAPKLLIYAASSLQSGVPSRFSGSGSGTDFTLTISSLQPEDFATYYCQQSYSTPLTFGGGTKVEIK

SEQ ID NO: 619 - protein, 250 aa, synthetic construct
  REGION 1..250: note = HLA-A*03 scFv
EVQLVQSGAEVKKPGESLKISCKGSGYSFTSYWIGWVRQMPGKGLEWMGIIYPGDSDTRYSPSFQGQVTISADKSISTAYLQWSSLKASDTAMYYCARDSGYKYNLYYYYYYMDVWGKGTTVTVSSGGGGSGGGGSGGGGSGGDIQMTQSPSSLSASVGDRVTITCRASQSISSYLNWYQQKPGKAPKLLIYAASSLQSGVPSRFSGSGSGTDFTLTISSLQPEDFATYYCQQSYSTPLTFGGGTKVEIK

SEQ ID NO: 620 - protein, 249 aa, synthetic construct
  REGION 1..249: note = HLA-A*03 scFv
QVQLVQSGAEVKKPGASVKVSCKASGYTFTSYGISWVRQAPGQGLEWMGWISAYNGNTNYAQKLQGRVTMTTDTSTSTAYMELRSLRSDDTAVYYCARGGDLSHYYYYMDVWGKGTTVTVSSGGGGSGGGGSGGGGSGGQTVVTQEPSLTVSPGGTVTLTCASSTGAVTSGYYPNWFQQKPGQAPRALIYSTSNKHSWTPARFSGSLLGGKAALTLSGVQPEDEAEYYCLLYYGGAQWVFGGGTKLTVL

SEQ ID NO: 621 - protein, 246 aa, synthetic construct
  REGION 1..246: note = HLA-A*03 scFv
QVQLVQSGAEVKKPGASVKVSCKASGYTFTSYGISWVRQAPGQGLEWMGWISAYNGNTNYAQKLQGRVTMTTDTSTSTAYMELRSLRSDDTAVYYCARENRRYNSCYYFDYWGQGTLVTVSSGGGGSGGGGSGGGGSGGDIQMTQSPSSLSASVGDRVTITCRASQSISSYLNWYQQKPGKAPKLLIYAASSLQSGVPSRFSGSGSGTDFTLTISSLQPEDFATYYCQQSYSTPLTFGGGTKVEIK

SEQ ID NO: 622 - protein, 249 aa, synthetic construct
  REGION 1..249: note = HLA-A*03 scFv
QVQLVQSGAEVKKPGASVKVSCKASGYTFTSYGISWVRQAPGQGLEWMGWISAYNGNTNYAQKLQGRVTMTTDTSTSTAYMELRSLRSDDTAVYYCARGGDLSHYYYYLDVWGKGTTVTVSSGGGGSGGGGSGGGGSGGQTVVTQEPSLTVSPGGTVTLTCASSTGAVTSGYYPNWFQQKPGQAPRALIYSTSNKHSWTPARFSGSLLGGKAALTLSGVQPEDEAEYYCLLYYGGAQWVFGGGTKLTVL

SEQ ID NO: 623 - protein, 245 aa, synthetic construct
  REGION 1..245: note = HLA-A*03 scFv
EVQLVESGGGLVQPGGSLRLSCAASGFTVSSNYMSWVRQAPGKGLEWVSVIYSGGSTYYADSVKGRFTISRDNSKNTLYLQMNSLRAEDTAVYYCARATLLSLSYDAFDIWGQGTMVTVSSGGGGSGGGGSGGGGSGGDIQMTQSPSSLSASVGDRVTITCRASQSISSYLNWYQQKPGKAPKLLIYAASSLQSGVPSRFSGSGSGTDFTLTISSLQPEDFATYYCQQSYSTPLTFGGGTKVEIK

SEQ ID NO: 624 - protein, 248 aa, synthetic construct
  REGION 1..248: note = HLA-A*03 scFv
QVQLVQSGAEVKKPGASVKVSCKASGYTFTSYGISWVRQAPGQGLEWMGWISAYNGNTNYAQKLQGRVTMTTDTSTSTAYMELRSLRSDDTAVYYCARGGDLSHYYYMDVWGKGTTVTVSSGGGGSGGGGSGGGGSGGQTVVTQEPSLTVSPGGTVTLTCASSTGAVTSGYYPNWFQQKPGQAPRALIYSTSNKHSWTPARFSGSLLGGKAALTLSGVQPEDEAEYYCLLYYGGAQWVFGGGTKLTVL

SEQ ID NO: 625 - protein, 241 aa, synthetic construct
  REGION 1..241: note = HLA-A*03 scFv
EVQLVQSGAEVKKPGESLKISCKGSGYSFTSYWIGWVRQMPGKGLEWMGIIYPGDSDTRYSPSFQGQVTISADKSISTAYLQWSSLKASDTAMYYCARERDRWFDPWGQGTLVTVSSGGGGSGGGGSGGGGSGGDIQMTQSPSSLSASVGDRVTITCRASQSISSYLNWYQQKPGKAPKLLIYAASSLQSGVPSRFSGSGSGTDFTLTISSLQPEDFATYYCQQSYSTPLTFGGGTKVEIK

SEQ ID NO: 626 - protein, 247 aa, synthetic construct
  REGION 1..247: note = HLA-A*03 scFv
QVQLVQSGAEVKKPGASVKVSCKASGYTFTSYGISWVRQAPGQGLEWMGWISAYNGNTNYAQKLQGRVTMTTDTSTSTAYMELRSLRSDDTAVYYCARETPPSLGAFDIWGQGTMVTVSSGGGGSGGGGSGGGGSGGQSALTQPPSASGSPGQSVTISCTGTSSDVGGYNYVSWYQQHPGKAPKLMIYEVSKRPSGVPDRFSGSKSGNTASLTVSGLQAEDEADYYCSSYAGSNNWVFGGGTKLTVL

SEQ ID NO: 627 - protein, 251 aa, synthetic construct
  REGION 1..251: note = HLA-A*03 scFv
QLQLQESGPGLVKPSETLSLTCTVSGGSISSSSYYWGWIRQPPGKGLEWIGSIYYSGSTYYNPSLKSRVTISVDTSKNQFSLKLSSVTAADTAVYYCAREAYCLSDSYWYFDLWGRGTLVTVSSGGGGSGGGGSGGGGSGGQSVLTQPPSASGTPGQRVTISCSGSSSNIGSNTVNWYQQLPGTAPKLLIYSNNQRPSGVPDRFSGSKSGTSASLAISGLQSEDEADYYCAAWDDSLNGWVFGGGTKLTVL

SEQ ID NO: 628 - protein, 248 aa, synthetic construct
  REGION 1..248: note = HLA-A*03 scFv
QVQLQESGPGLVKPSQTLSLTCTVSGGSISSGGYYWSWIRQPPGKGLEWIGYIYYSGSTYYNPSLKSRVTISVDTSKNQFSLKLSSVTAADTAVYYCARESWKYFYPRGYMDVWGKGTTVTVSSGGGGSGGGGSGGGGSGGDIQMTQSPSSLSASVGDRVTITCRASQSISSYLNWYQQKPGKAPKLLIYAASSLQSGVPSRFSGSGSGTDFTLTISSLQPEDFATYYCQQSYSTPLTFGGGTKVEIK

SEQ ID NO: 629 - protein, 248 aa, synthetic construct
  REGION 1..248: note = HLA-A*01 scFv
QVQLVQSGAEVKKPGASVKVSCKASGYTFTSYGISWVRQAPGQGLEWMGWISAYNGNTNYAQKLQGRVTMTTDTSTSTAYMELRSLRSDDTAVYYCARGGWTAWYYYMDVWGKGTTVTVSSGGGGSGGGGSGGGGSGGQTVVTQEPSLTVSPGGTVTLTCASSTGAVTSGYYPNWFQQKPGQAPRALIYSTSNKHSWTPARFSGSLLGGKAALTLSGVQPEDEAEYYCLLYYGGAQWVFGGGTKLTVL

SEQ ID NO: 630 - protein, 244 aa, synthetic construct
  REGION 1..244: note = HLA-A*01 scFv
EVQLVESGGGLVQPGGSLRLSCAASGFTFSSYSMNWVRQAPGKGLEWVSYISSSSSTIYYADSVKGRFTISRDNAKNSLYLQMNSLRAEDTAVYYCARAKYYYMDVWGKGTTVTVSSGGGGSGGGGSGGGGSGGQSVLTQPPSASGTPGQRVTISCSGSSSNIGSNTVNWYQQLPGTAPKLLIYSNNQRPSGVPDRFSGSKSGTSASLAISGLQSEDEADYYCAAWDDSLNGWVFGGGTKLTVL

SEQ ID NO: 631 - protein, 248 aa, synthetic construct
  REGION 1..248: note = HLA-A*01 scFv
QVQLQESGPGLVKPSQTLSLTCTVSGGSISSGGYYWSWIRQPPGKGLEWIGYIYYSGSTYYNPSLKSRVTISVDTSKNQFSLKLSSVTAADTAVYYCARDQVDKNTYYYYMDVWGKGTTVTVSSGGGGSGGGGSGGGGSGGDIQMTQSPSSLSASVGDRVTITCRASQSISSYLNWYQQKPGKAPKLLIYAASSLQSGVPSRFSGSGSGTDFTLTISSLQPEDFATYYCQQSYSTPLTFGGGTKVEIK

SEQ ID NO: 632 - protein, 243 aa, synthetic construct
  REGION 1..243: note = HLA-A*01 scFv
QVQLVESGGGLVKPGGSLRLSCAASGFTFSDYYMSWIRQAPGKGLEWVSYISSSGSTIYYADSVKGRFTISRDNAKNSLYLQMNSLRAEDTAVYYCARACQLAEYFQHWGQGTLVTVSSGGGGSGGGGSGGGGSGGDIQMTQSPSSVSASVGDRVTITCRASQGISSWLAWYQQKPGKAPKLLIYAASSLQSGVPSRFSGSGSGTDFTLTISSLQPEDFATYYCQQANSFPLTFGGGTKVEIK

SEQ ID NO: 633 - protein, 248 aa, synthetic construct
  REGION 1..248: note = HLA-A*01 scFv
QVQLQESGPGLVKPSQTLSLTCTVSGGSISSGGYYWSWIRQPPGKGLEWIGYIYYSGSTYYNPSLKSRVTISVDTSKNQFSLKLSSVTAADTAVYYCARDRVDKNTSYYYMDVWGKGTTVTVSSGGGGSGGGGSGGGGSGGDIQMTQSPSSLSASVGDRVTITCRASQSISSYLNWYQQKPGKAPKLLIYAASSLQSGVPSRFSGSGSGTDFTLTISSLQPEDFATYYCQQSYSTPLTFGGGTKVEIK

SEQ ID NO: 634 - protein, 245 aa, synthetic construct
  REGION 1..245: note = HLA-A*01 scFv
QVQLQESGPGLVKPSDTLSLTCAVSGYSISSSNWWGWIRQPPGKGLEWIGYIYYSGSTYYNPSLKSRVTMSVDTSKNQFSLKLSSVTAVDTAVYYCARRVQLKLVHWFDPWGQGTLVTVSSGGGGSGGGGSGGGGSGGDIQMTQSPSSLSASVGDRVTITCRASQSISSYLNWYQQKPGKAPKLLIYAASSLQSGVPSRFSGSGSGTDFTLTISSLQPEDFATYYCQQSYSTPLTFGGGTKVEIK

SEQ ID NO: 635 - protein, 245 aa, synthetic construct
  REGION 1..245: note = HLA-A*01 scFv
QVQLVQSGAEVKKPGASVKVSCKASGYTFTSYDINWVRQATGQGLEWMGWMNPNSGNTGYAQKFQGRVTMTRNTSISTAYMELSSLRSEDTAVYYCATYYDYVTVFYFQHWGQGTLVTVSSGGGGSGGGGSGGGGSGGDIQMTQSPSSLSASVGDRVTITCRASQSISSYLNWYQQKPGKAPKLLIYAASSLQSGVPSRFSGSGSGTDFTLTISSLQPEDFATYYCQQSYSTPLTFGGGTKVEIK

SEQ ID NO: 636 - protein, 245 aa, synthetic construct
  REGION 1..245: note = HLA-A*01 scFv
QLQLQESGSGLVKPSQTLSLTCAVSGGSISSGGYSWSWIRQPPGKGLEWIGYIYHSGSTYYNPSLKSRVTISVDRSKNQFSLKLSSVTAADTAVYYCARESYPSFYAFDIWGQGTMVTVSSGGGGSGGGGSGGGGSGGDIQMTQSPSSLSASVGDRVTITCRASQSISSYLNWYQQKPGKAPKLLIYAASSLQSGVPSRFSGSGSGTDFTLTISSLQPEDFATYYCQQSYSTPLTFGGGTKVEIK

SEQ ID NO: 637 - protein, 249 aa, synthetic construct
  REGION 1..249: note = HLA-A*01 scFv
QITLKESGPTLVKPTQTLTLTCTFSGFSLSTSGVGVGWIRQPPGKALEWLALIYWNDDKRYSPSLKSRLTITKDTSKNQVVLTMTNMDPVDTATYYCAHSNMWSYSLNDYYFDYWGQGTLVTVSSGGGGSGGGGSGGGGSGGDIQMTQSPSSLSASVGDRVTITCRASQSISSYLNWYQQKPGKAPKLLIYAASSLQSGVPSRFSGSGSGTDFTLTISSLQPEDFATYYCQQSYSTPLTFGGGTKVEIK

SEQ ID NO: 638 - protein, 11 aa, synthetic construct
  REGION 1..11: note = CDR-L1
RASQSISSYLN

SEQ ID NO: 639 - protein, 14 aa, synthetic construct
  REGION 1..14: note = CDR-L1
ASSTGAVTSGYYPN

SEQ ID NO: 640 - protein, 14 aa, synthetic construct
  REGION 1..14: note = CDR-L1
TGTSSDVGGYNYVS

SEQ ID NO: 641 - protein, 13 aa, synthetic construct
  REGION 1..13: note = CDR-L1
SGSSSNIGSNTVN

SEQ ID NO: 642 - protein, 11 aa, synthetic construct
  REGION 1..11: note = CDR-L1
RASENIYSNLA

SEQ ID NO: 643 - protein, 11 aa, synthetic construct
  REGION 1..11: note = CDR-L1
RASQGISSALA

SEQ ID NO: 644 - protein, 11 aa, synthetic construct
  REGION 1..11: note = CDR-L1
RASQGISSWLA

SEQ ID NO: 645 - protein, 7 aa, synthetic construct
  REGION 1..7: note = CDR-L2
AASSLQS

SEQ ID NO: 646 - protein, 7 aa, synthetic construct
  REGION 1..7: note = CDR-L2
STSNKHS

SEQ ID NO: 647 - protein, 7 aa, synthetic construct
  REGION 1..7: note = CDR-L2
EVSKRPS

SEQ ID NO: 648 - protein, 7 aa, synthetic construct
  REGION 1..7: note = CDR-L2
SNNQRPS

SEQ ID NO: 649 - protein, 7 aa, synthetic construct
  REGION 1..7: note = CDR-L2
AATYLPD

SEQ ID NO: 650 - protein, 9 aa, synthetic construct
  REGION 1..9: note = CDR-L3
QQSYSTPLT

SEQ ID NO: 651 - protein, 10 aa, synthetic construct
  REGION 1..10: note = CDR-L3
LLYYGGAQWV

SEQ ID NO: 652 - protein, 10 aa, synthetic construct
  REGION 1..10: note = CDR-L3
SSYAGSNNWV

SEQ ID NO: 653 - protein, 11 aa, synthetic construct
  REGION 1..11: note = CDR-L3
AAWDDSLNGWV

SEQ ID NO: 654 - protein, 9 aa, synthetic construct
  REGION 1..9: note = CDR-L3
QHFWVTPYT

SEQ ID NO: 655 - protein, 9 aa, synthetic construct
  REGION 1..9: note = CDR-L3
QQYNSYPLT

SEQ ID NO: 656 - protein, 9 aa, synthetic construct
  REGION 1..9: note = CDR-L3
QQANSFPLT

SEQ ID NO: 657 - protein, 5 aa, synthetic construct
  REGION 1..5: note = CDR-H1
SYGIS

SEQ ID NO: 658 - protein, 5 aa, synthetic construct
  REGION 1..5: note = CDR-H1
SYSMN

SEQ ID NO: 659 - protein, 7 aa, synthetic construct
  REGION 1..7: note = CDR-H1
SGSYYWS

SEQ ID NO: 660 - protein, 5 aa, synthetic construct
  REGION 1..5: note = CDR-H1
SYYWS

SEQ ID NO: 661 - protein, 5 aa, synthetic construct
  REGION 1..5: note = CDR-H1
SYWIG

SEQ ID NO: 662 - protein, 5 aa, synthetic construct
  REGION 1..5: note = CDR-H1
SNYMS

SEQ ID NO: 663 - protein, 7 aa, synthetic construct
  REGION 1..7: note = CDR-H1
SSSYYWG

SEQ ID NO: 664 - protein, 7 aa, synthetic construct
  REGION 1..7: note = CDR-H1
SGGYYWS

SEQ ID NO: 665 - protein, 6 aa, synthetic construct
  REGION 1..6: note = CDR-H1
SGYSWH

SEQ ID NO: 666 - protein, 7 aa, synthetic construct
  REGION 1..7: note = CDR-H1
TSGVGVG

SEQ ID NO: 667 - protein, 5 aa, synthetic construct
  REGION 1..5: note = CDR-H1
SYWMH

SEQ ID NO: 668 - protein, 5 aa, synthetic construct
  REGION 1..5: note = CDR-H1
SYAMS

SEQ ID NO: 669 - protein, 5 aa, synthetic construct
  REGION 1..5: note = CDR-H1
SYAMN

SEQ ID NO: 670 - protein, 5 aa, synthetic construct
  REGION 1..5: note = CDR-H1
DYYMS

SEQ ID NO: 671 - protein, 7 aa, synthetic construct
  REGION 1..7: note = CDR-H1
SNSAAWN

SEQ ID NO: 672 - protein, 5 aa, synthetic construct
  REGION 1..5: note = CDR-H1
DYYMH

SEQ ID NO: 673 - protein, 6 aa, synthetic construct
  REGION 1..6: note = CDR-H1
SSNWWG

SEQ ID NO: 674 - protein, 5 aa, synthetic construct
  REGION 1..5: note = CDR-H1
SYDIN

SEQ ID NO: 675 - protein, 7 aa, synthetic construct
  REGION 1..7: note = CDR-H1
SGGYSWS

SEQ ID NO: 676 - protein, 17 aa, synthetic construct
  REGION 1..17: note = CDR-H2
WISAYNGNTNYAQKLQG

SEQ ID NO: 677 - protein, 17 aa, synthetic construct
  REGION 1..17: note = CDR-H2
YISSSSSTIYYADSVKG

SEQ ID NO: 678 - protein, 16 aa, synthetic construct
  REGION 1..16: note = CDR-H2
YIYYSGSTNYNPSLKS

SEQ ID NO: 679 - protein, 17 aa, synthetic construct
  REGION 1..17: note = CDR-H2
IIYPGDSDTRYSPSFQG

SEQ ID NO: 680 - protein, 16 aa, synthetic construct
  REGION 1..16: note = CDR-H2
VIYSGGSTYYADSVKG

SEQ ID NO: 681 - protein, 16 aa, synthetic construct
  REGION 1..16: note = CDR-H2
SIYYSGSTYYNPSLKS

SEQ ID NO: 682 - protein, 16 aa, synthetic construct
  REGION 1..16: note = CDR-H2
YIYYSGSTYYNPSLKS

SEQ ID NO: 683 - protein, 16 aa, synthetic construct
  REGION 1..16: note = CDR-H2
YIHFSGSTHYHPSLKS

SEQ ID NO: 684 - protein, 16 aa, synthetic construct
  REGION 1..16: note = CDR-H2
LIYWNDDKRYSPSLKS

SEQ ID NO: 685 - protein, 17 aa, synthetic construct
  REGION 1..17: note = CDR-H2
RINSDGSSTSYADSVKG

SEQ ID NO: 686 - protein, 17 aa, synthetic construct
  REGION 1..17: note = CDR-H2
AISGSGGSTYYADSVKG

SEQ ID NO: 687 - protein, 17 aa, synthetic construct
  REGION 1..17: note = CDR-H2
WINTNTGNPTYAQGFTG

SEQ ID NO: 688 - protein, 17 aa, synthetic construct
  REGION 1..17: note = CDR-H2
YISSSGSTIYYADSVKG

SEQ ID NO: 689 - protein, 18 aa, synthetic construct
  REGION 1..18: note = CDR-H2
RTYYRSKWYNDYAVSVKS

SEQ ID NO: 690 - protein, 17 aa, synthetic construct
  REGION 1..17: note = CDR-H2
LVDPEDGETIYAEKFQG

SEQ ID NO: 691 - protein, 17 aa, synthetic construct
  REGION 1..17: note = CDR-H2
WMNPNSGNTGYAQKFQG

SEQ ID NO: 692 - protein, 16 aa, synthetic construct
  REGION 1..16: note = CDR-H2
YIYHSGSTYYNPSLKS

SEQ ID NO: 693 - protein, 11 aa, synthetic construct
  REGION 1..11: note = CDR-H3
ERVSQRGAFDI

SEQ ID NO: 694 - protein, 10 aa, synthetic construct
  REGION 1..10: note = CDR-H3
GNPDKDPFDY

SEQ ID NO: 695 - protein, 11 aa, synthetic construct
  REGION 1..11: note = CDR-H3
DFYCTNWYFDL

SEQ ID NO: 696 - protein, 12 aa, synthetic construct
  REGION 1..12: note = CDR-H3
ESSSGSYWYFDL

SEQ ID NO: 697 - protein, 17 aa, synthetic construct
  REGION 1..17: note = CDR-H3
DSGYKYNLYYYYYYMDV

SEQ ID NO: 698 - protein, 13 aa, synthetic construct
  REGION 1..13: note = CDR-H3
GGDLSHYYYYMDV

SEQ ID NO: 699 - protein, 13 aa, synthetic construct
  REGION 1..13: note = CDR-H3
ENRRYNSCYYFDY

SEQ ID NO: 700 - protein, 13 aa, synthetic construct
  REGION 1..13: note = CDR-H3
GGDLSHYYYYLDV

SEQ ID NO: 701 - protein, 13 aa, synthetic construct
  REGION 1..13: note = CDR-H3
ATLLSLSYDAFDI

SEQ ID NO: 702 - protein, 12 aa, synthetic construct
  REGION 1..12: note = CDR-H3
GGDLSHYYYMDV

SEQ ID NO: 703 - protein, 8 aa, synthetic construct
  REGION 1..8: note = CDR-H3
ERDRWFDP

SEQ ID NO: 704 - protein, 11 aa, synthetic construct
  REGION 1..11: note = CDR-H3
ETPPSLGAFDI

SEQ ID NO: 705 - protein, 14 aa, synthetic construct
  REGION 1..14: note = CDR-H3
EAYCLSDSYWYFDL

SEQ ID NO: 706 - protein, 14 aa, synthetic construct
  REGION 1..14: note = CDR-H3
ESWKYFYPRGYMDV

SEQ ID NO: 707 - protein, 11 aa, synthetic construct
  REGION 1..11: note = CDR-H3
GGVVSHYAMDC

SEQ ID NO: 708 - protein, 7 aa, synthetic construct
  REGION 1..7: note = CDR-H3
SFDWFDP

SEQ ID NO: 709 - protein, 14 aa, synthetic construct
  REGION 1..14: note = CDR-H3
ERSISPYYYYYMDV

SEQ ID NO: 710 - protein, 10 aa, synthetic construct
  REGION 1..10: note = CDR-H3
DSVIWYWFDP

SEQ ID NO: 711 - protein, 15 aa, synthetic construct
  REGION 1..15: note = CDR-H3
EEILPRLSYYYYMDV

SEQ ID NO: 712 - protein, 12 aa, synthetic construct
  REGION 1..12: note = CDR-H3
GGRAHSSWYFDL

SEQ ID NO: 713 - protein, 17 aa, synthetic construct
  REGION 1..17: note = CDR-H3
DRIKILPRLGYYYYMDV

SEQ ID NO: 714 - protein, 12 aa, synthetic construct
  REGION 1..12: note = CDR-H3
DTVIHYYYYMDV

SEQ ID NO: 715 - protein, 16 aa, synthetic construct
  REGION 1..16: note = CDR-H3
DVIVEVFLSYYYYMDV

SEQ ID NO: 716 - protein, 12 aa, synthetic construct
  REGION 1..12: note = CDR-H3
DIFIHYYYYMDV

SEQ ID NO: 717 - protein, 14 aa, synthetic construct
  REGION 1..14: note = CDR-H3
DGTFYSYSPYYFDY

SEQ ID NO: 718 - protein, 17 aa, synthetic construct
  REGION 1..17: note = CDR-H3
EWIKILPRLGYYYYMDV

SEQ ID NO: 719 - protein, 12 aa, synthetic construct
  REGION 1..12: note = CDR-H3
DRSLYYYYYMDV

SEQ ID NO: 720 - protein, 14 aa, synthetic construct
  REGION 1..14: note = CDR-H3
DKILAPNYYYYMDV

SEQ ID NO: 721 - protein, 16 aa, synthetic construct
  REGION 1..16: note = CDR-H3
EKSWKYFYYYYYYMDV

SEQ ID NO: 722 - protein, 15 aa, synthetic construct
  REGION 1..15: note = CDR-H3
ENTSTIPYYYYYMDV

SEQ ID NO: 723 - protein, 19 aa, synthetic construct
  REGION 1..19: note = CDR-H3
EDVDKNTSTIYYYYYYMDV

SEQ ID NO: 724 - protein, 17 aa, synthetic construct
  REGION 1..17: note = CDR-H3
DGGDIVSSSAIYWYFDL

SEQ ID NO: 725 - protein, 14 aa, synthetic construct
  REGION 1..14: note = CDR-H3
DLILPPYYYYYMDV

SEQ ID NO: 726 - protein, 19 aa, synthetic construct
  REGION 1..19: note = CDR-H3
ETWIKILPRYYYYYYYMDV

SEQ ID NO: 727 - protein, 12 aa, synthetic construct
  REGION 1..12: note = CDR-H3
DLSRYYYYYMDV

SEQ ID NO: 728 - protein, 9 aa, synthetic construct
  REGION 1..9: note = CDR-H3
EHIVLCFDY

SEQ ID NO: 729 - protein, 15 aa, synthetic construct
  REGION 1..15: note = CDR-H3
DKILPRPYYYYYMDV

SEQ ID NO: 730 - protein, 8 aa, synthetic construct
  REGION 1..8: note = CDR-H3
GSNEYFQH

SEQ ID NO: 731 - protein, 9 aa, synthetic construct
  REGION 1..9: note = CDR-H3
GTSYWYFDL

SEQ ID NO: 732 - protein, 14 aa, synthetic construct
  REGION 1..14: note = CDR-H3
EEIVEVFYYYYMDV

SEQ ID NO: 733 - protein, 8 aa, synthetic construct
  REGION 1..8: note = CDR-H3
VDDYYFDY

SEQ ID NO: 734 - protein, 14 aa, synthetic construct
  REGION 1..14: note = CDR-H3
STNILLSYTKAFDI

SEQ ID NO: 735 - protein, 12 aa, synthetic construct
  REGION 1..12: note = CDR-H3
DKTYYYYYYMDV

SEQ ID NO: 736 - protein, 19 aa, synthetic construct
  REGION 1..19: note = CDR-H3
EKYFHDKYFHDYYYYYMDV

SEQ ID NO: 737 - protein, 12 aa, synthetic construct
  REGION 1..12: note = CDR-H3
DTSVYYYYYMDV

SEQ ID NO: 738 - protein, 14 aa, synthetic construct
  REGION 1..14: note = CDR-H3
EKILPYYYYYYMDV

SEQ ID NO: 739 - protein, 21 aa, synthetic construct
  REGION 1..21: note = CDR-H3
QWIYIYINPRGFIFLHDAFDI

SEQ ID NO: 740 - protein, 12 aa, synthetic construct
  REGION 1..12: note = CDR-H3
EDVDFHHDAFDI

SEQ ID NO: 741 - protein, 19 aa, synthetic construct
  REGION 1..19: note = CDR-H3
EGVDKNTSTIYYYYYYMDV

SEQ ID NO: 742 - protein, 8 aa, synthetic construct
  REGION 1..8: note = CDR-H3
DRRGYFDL

SEQ ID NO: 743 - protein, 15 aa, synthetic construct
  REGION 1..15: note = CDR-H3
GIHVDIRSMEDWFDP

SEQ ID NO: 744 - protein, 12 aa, synthetic construct
  REGION 1..12: note = CDR-H3
DIGTSYYYYMDV

SEQ ID NO: 745 - protein, 15 aa, synthetic construct
  REGION 1..15: note = CDR-H3
EVVEVFLYYYYYMDV

SEQ ID NO: 746 - protein, 12 aa, synthetic construct
  REGION 1..12: note = CDR-H3
DLYYYYYYYMDV

SEQ ID NO: 747 - protein, 22 aa, synthetic construct
  REGION 1..22: note = CDR-H3
ESWKYFYPRGSIFIHYYYYMDV

SEQ ID NO: 748 - protein, 14 aa, synthetic construct
  REGION 1..14: note = CDR-H3
DRIVEVFYYYYMDV

SEQ ID NO: 749 - protein, 16 aa, synthetic construct
  REGION 1..16: note = CDR-H3
EKYFHDWLYYYYYMDV

SEQ ID NO: 750 - protein, 16 aa, synthetic construct
  REGION 1..16: note = CDR-H3
DLVDKNTSYYYYYMDV

SEQ ID NO: 751 - protein, 8 aa, synthetic construct
  REGION 1..8: note = CDR-H3
VQNEYFQH

SEQ ID NO: 752 - protein, 6 aa, synthetic construct
  REGION 1..6: note = CDR-H3
ANWFDP

SEQ ID NO: 753 - protein, 12 aa, synthetic construct
  REGION 1..12: note = CDR-H3
GGWTAWYYYMDV

SEQ ID NO: 754 - protein, 8 aa, synthetic construct
  REGION 1..8: note = CDR-H3
AKYYYMDV

SEQ ID NO: 755 - protein, 14 aa, synthetic construct
  REGION 1..14: note = CDR-H3
DQVDKNTYYYYMDV

SEQ ID NO: 756 - protein, 10 aa, synthetic construct
  REGION 1..10: note = CDR-H3
ACQLAEYFQH

SEQ ID NO: 757 - protein, 14 aa, synthetic construct
  REGION 1..14: note = CDR-H3
DRVDKNTSYYYMDV

SEQ ID NO: 758 - protein, 12 aa, synthetic construct
  REGION 1..12: note = CDR-H3
RVQLKLVHWFDP

SEQ ID NO: 759 - protein, 12 aa, synthetic construct
  REGION 1..12: note = CDR-H3
YYDYVTVFYFQH

SEQ ID NO: 760 - protein, 11 aa, synthetic construct
  REGION 1..11: note = CDR-H3
ESYPSFYAFDI

SEQ ID NO: 761 - protein, 15 aa, synthetic construct
  REGION 1..15: note = CDR-H3
SNMWSYSLNDYYFDY

SEQ ID NO: 762 - protein, 112 aa, synthetic construct
  REGION 1..112: note = extracellular ligand binding domain VL
DVLMTQTPLSLPVSLGDQASISCRSSQSIVHSNGNTYLEWYLQKPGQSPKLLIYKVSNRFSGVPDRFSGSGSGTDFTLKISRVEAEDLGVYYCFQGSHVPRTSGGGTKLEIK

SEQ ID NO: 763 - protein, 118 aa, synthetic construct
  REGION 1..118: note = extracellular ligand binding domain VH
QVQLQQSGPELVKPGASVRISCKASGYTFTSYHIHWVKQRPGQGLEWIGWIYPGNVNTEYNEKFKGKATLTADKSSSTAYMHLSSLTSEDSAVYFCAREEITYAMDYWGQGTSVTVSS

SEQ ID NO: 764 - protein, 18 aa, unidentified
  REGION 1..18: note = T2A self-cleaving peptide
EGRGSLLTCGDVEENPGP

SEQ ID NO: 765 - protein, 19 aa, unidentified
  REGION 1..19: note = P2A self-cleaving peptide
ATNFSLLKQAGDVEENPGP

SEQ ID NO: 766 - protein, 20 aa, unidentified
  REGION 1..20: note = E2A self-cleaving peptide
QCTNYALLKLAGDVESNPGP

SEQ ID NO: 767 - protein, 22 aa, unidentified
  REGION 1..22: note = F2A self-cleaving peptide
VKQTLNFDLLKLAGDVESNPGP

SEQ ID NO: 768 - DNA, 63 bp, unidentified
  misc_feature 1..63: note = encodes T2A self-cleaving peptide
  source 1..63: mol_type = unassigned DNA
ggatccggagagggcagaggcagcctgctgacatgtggcgacgtggaagagaaccctggcccc

SEQ ID NO: 769 - RNA, 943 nt, Homo sapiens
  source 1..943: mol_type = unassigned RNA
attcctgaagctgacagcattcgggccgagatgtctcgctccgtggccttagctgtgctcgcgctactctctctttctggcctggaggctatccagcgtactccaaagattcaggtttactcacgtcatccagcagagaatggaaagtcaaatttcctgaattgctatgtgtctgggtttcatccatccgacattgaagttgacttactgaagaatggagagagaattgaaaaagtggagcattcagacttgtctttcagcaaggactggtctttctatctcttgtactacactgaattcacccccactgaaaaagatgagtatgcctgccgtgtgaaccatgtgactttgtcacagcccaagatagttaagtgggatcgagacatgtaagcagcatcatggaggtttgaagatgccgcatttggattggatgaattccaaattctgcttgcttgctttttaatattgatatgcttatacacttacactttatgcacaaaatgtagggttataataatgttaacatggacatgatcttctttataattctactttgagtgctgtctccatgtttgatgtatctgagcaggttgctccacaggtagctctaggagggctggcaacttagaggtggggagcagagaattctcttatccaacatcaacatcttggtcagatttgaactcttcaatctcttgcactcaaagcttgttaagatagttaagcgtgcataagttaacttccaatttacatactctgcttagaatttgggggaaaatttagaaatataattgacaggattattggaaatttgttataatgaatgaaacattttgtcatataagattcatatttacttcttatacatttgataaagtaaggcatggttgtggttaatctggtttatttttgttccacaagttaaataaatcataaaacttga

SEQ ID NO: 770 - DNA, 6654 bp, Homo sapiens
  source 1..6654: mol_type = unassigned DNA
aagtggaggcgtcgcgctggcgggcattcctgaagctgacagcattcgggccgagatgtctcgctccgtggccttagctgtgctcgcgctactctctctttctggcctggaggctatccagcgtgagtctctcctaccctcccgctctggtccttcctctcccgctctgcaccctctgtggccctcgctgtgctctctcgctccgtgacttcccttctccaagttctccttggtggcccgccgtggggctagtccagggctggatctcggggaagcggcggggtggcctgggagtggggaagggggtgcgcacccgggacgcgcgctacttgcccctttcggcggggagcaggggagacctttggcctacggcgacgggagggtcgggacaaagtttagggcgtcgataagcgtcagagcgccgaggttgggggagggtttctcttccgctctttcgcggggcctctggctcccccagcgcagctggagtgggggacgggtaggctcgtcccaaaggcgcggcgctgaggtttgtgaacgcgtggaggggcgcttggggtctgggggaggcgtcgcccgggtaagcctgtctgctgcggctctgcttcccttagactggagagctgtggacttcgtctaggcgcccgctaagttcgcatgtcctagcacctctgggtctatgtggggccacaccgtggggaggaaacagcacgcgacgtttgtagaatgcttggctgtgatacaaagcggtttcgaataattaacttatttgttcccatcacatgtcacttttaaaaaattataagaactacccgttattgacatctttctgtgtgccaaggactttatgtgctttgcgtcatttaattttgaaaacagttatcttccgccatagataactactatggttatcttctgcctctcacagatgaagaaactaaggcaccgagattttaagaaacttaattacacaggggataaatggcagcaatcgagattgaagtcaagcctaaccagggcttttgcgggagcgcatgccttttggctgtaattcgtgcatttttttttaagaaaaacgcctgccttctgcgtgagattctccagagcaaactgggcggcatgggccctgtggtcttttcgtacagagggcttcctctttggctctttgcctggttgtttccaagatgtactgtgcctcttactttcggttttgaaaacatgagggggttgggcgtggtagcttacgcctgtaatcccagcacttagggaggccgaggcgggaggatggcttgaggtccgtagttgagaccagcctggccaacatggtgaagcctggtctctacaaaaaataataacaaaaattagccgggtgtggtggctcgtgcctgtggtcccagctgctccggtggctgaggcgggaggatctcttgagcttaggcttttgagctatcatggcgccagtgcactccagcgtgggcaacagagcgagaccctgtctctcaaaaaagaaaaaaaaaaaaaaagaaagagaaaagaaaagaaagaaagaagtgaaggtttgtcagtcaggggagctgtaaaaccattaataaagataatccaagatggttaccaagactgttgaggacgccagagatcttgagcactttctaagtacctggcaatacactaagcgcgctcaccttttcctctggcaaaacatgatcgaaagcagaatgttttgatcatgagaaaattgcatttaatttgaatacaatttatttacaacataaaggataatgtatatatcaccaccattactggtatttgctggttatgttagatgtcattttaaaaaataacaatctgatatttaaaaaaaaatcttattttgaaaatttccaaagtaatacatgccatgcatagaccatttctggaagataccacaagaaacatgtaatgatgattgcctctgaaggtctattttcctcctctgacctgtgtgtgggttttgtttttgttttactgtgggcataaattaatttttcagttaagttttggaagcttaaataactctccaaaagtcataaagccagtaactggttgagcccaaattcaaacccagcctgtctgatacttgtcctcttcttagaaaagattacagtgatgctctcacaaaatcttgccgccttccctcaaacagagagttccaggcaggatgaatctgtgctctgatccctgaggcatttaatatgttcttattattagaagctcagatgcaaagagctctcttagcttttaatgttatgaaaaaaatcaggtcttcattagattccccaatccacctcttgatggggctagtagcctttccttaatgatagggtgtttctagagagatatatctggtcaaggtggcctggtactcctccttctccccacagcctcccagacaaggaggagtagctgccttttagtgatcatgtaccctgaatataagtgtatttaaaagaattttatacacatatatttagtgtcaatctgtatatttagtagcactaacacttctcttcattttcaatgaaaaatatagagtttataatattttcttcccacttccccatggatggtctagtcatgcctctcattttggaaagtactgtttctgaaacattaggcaatatattcccaacctggctagtttacagcaatcacctgtggatgctaattaaaacgcaaatcccactgtcacatgcattactccatttgatcataatggaaagtatgttctgtcccatttgccatagtcctcacctatccctgttgtattttatcgggtccaactcaaccatttaaggtatttgccagctcttgtatgcatttaggttttgtttctttgttttttagctcatgaaattaggtacaaagtcagagaggggtctggcatataaaacctcagcagaaataaagaggttttgttgtttggtaagaacataccttgggttggttgggcacggtggctcgtgcctgtaatcccaacactttgggaggccaaggcaggctgatcacttgaagttgggagttcaagaccagcctggccaacatggtgaaatcccgtctctactgaaaatacaaaaattaaccaggcatggtggtgtgtgcctgtagtcccaggaatcacttgaacccaggaggcggaggttgcagtgagctgagatctcaccactgcacactgcactccagcctgggcaatggaatgagattccatcccaaaaaataaaaaaataaaaaaataaagaacataccttgggttgatccacttaggaacctcagataataacatctgccacgtatagagcaattgctatgtcccaggcactctactagacacttcatacagtttagaaaatcagatgggtgtagatcaaggcaggagcaggaaccaaaaagaaaggcataaacataagaaaaaaaatggaaggggtggaaacagagtacaataacatgagtaatttgatgggggctattatgaactgagaaatgaactttgaaaagtatcttggggccaaatcatgtagactcttgagtgatgtgttaaggaatgctatgagtgctgagagggcatcagaagtccttgagagcctccagagaaaggctcttaaaaatgcagcgcaatctccagtgacagaagatactgctagaaatctgctagaaaaaaaacaaaaaaggcatgtatagaggaattatgagggaaagataccaagtcacggtttattcttcaaaatggaggtggcttgttgggaaggtggaagctcatttggccagagtggaaatggaattgggagaaatcgatgaccaaatgtaaacacttggtgcctgatatagcttgacaccaagttagccccaagtgaaataccctggcaatattaatgtgtcttttcccgatattcctcaggtactccaaagattcaggtttactcacgtcatccagcagagaatggaaagtcaaatttcctgaattgctatgtgtctgggtttcatccatccgacattgaagttgacttactgaagaatggagagagaattgaaaaagtggagcattcagacttgtctttcagcaaggactggtctttctatctcttgtactacactgaattcacccccactgaaaaagatgagtatgcctgccgtgtgaaccatgtgactttgtcacagcccaagatagttaagtggggtaagtcttacattcttttgtaagctgctgaaagttgtgtatgagtagtcatatcataaagctgctttgatataaaaaaggtctatggccatactaccctgaatgagtcccatcccatctgatataaacaatctgcatattgggattgtcagggaatgttcttaaagatcagattagtggcacctgctgagatactgatgcacagcatggtttctgaaccagtagtttccctgcagttgagcagggagcagcagcagcacttgcacaaatacatatacactcttaacacttcttacctactggcttcctctagcttttgtggcagcttcaggtatatttagcactgaacgaacatctcaagaaggtataggcctttgtttgtaagtcctgctgtcctagcatcctataatcctggacttctccagtactttctggctggattggtatctgaggctagtaggaagggcttgttcctgctgggtagctctaaacaatgtattcatgggtaggaacagcagcctattctgccagccttatttctaaccattttagacatttgttagtacatggtattttaaaagtaaaacttaatgtcttccttttttttctccactgtctttttcatagatcgagacatgtaagcagcatcatggaggtaagtttttgaccttgagaaaatgtttttgtttcactgtcctgaggactatttatagacagctctaacatgataaccctcactatgtggagaacattgacagagtaacattttagcagggaaagaagaatcctacagggtcatgttcccttctcctgtggagtggcatgaagaaggtgtatggccccaggtatggccatattactgaccctctacagagagggcaaaggaactgccagtatggtattgcaggataaaggcaggtggttacccacattacctgcaaggctttgatctttcttctgccatttccacattggacatctctgctgaggagagaaaatgaaccactcttttcctttgtataatgttgttttattcttcagacagaagagaggagttatacagctctgcagacatcccattcctgtatggggactgtgtttgcctcttagaggttcccaggccactagaggagataaagggaaacagattgttataacttgatataatgatactataatagatgtaactacaaggagctccagaagcaagagagagggaggaacttggacttctctgcatctttagttggagtccaaaggcttttcaatgaaattctactgcccagggtacattgatgctgaaaccccattcaaatctcctgttatattctagaacagggaattgatttgggagagcatcaggaaggtggatgatctgcccagtcacactgttagtaaattgtagagccaggacctgaactctaatatagtcatgtgttacttaatgacggggacatgttctgagaaatgcttacacaaacctaggtgttgtagcctactacacgcataggctacatggtatagcctattgctcctagactacaaacctgtacagcctgttactgtactgaatactgtgggcagttgtaacacaatggtaagtatttgtgtatctaaacatagaagttgcagtaaaaatatgctattttaatcttatgagaccactgtcatatatacagtccatcattgaccaaaacatcatatcagcattttttcttctaagattttgggagcaccaaagggatacactaacaggatatactctttataatgggtttggagaactgtctgcagctacttcttttaaaaaggtgatctacacagtagaaattagacaagtttggtaatgagatctgcaatccaaataaaataaattcattgctaacctttttcttttcttttcaggtttgaagatgccgcatttggattggatgaattccaaattctgcttgcttgctttttaatattgatatgcttatacacttacactttatgcacaaaatgtagggttataataatgttaacatggacatgatcttctttataattctactttgagtgctgtctccatgtttgatgtatctgagcaggttgctccacaggtagctctaggagggctggcaacttagaggtggggagcagagaattctcttatccaacatcaacatcttggtcagatttgaactcttcaatctcttgcactcaaagcttgttaagatagttaagcgtgcataagttaacttccaatttacatactctgcttagaatttgggggaaaatttagaaatataattgacaggattattggaaatttgttataatgaatgaaacattttgtcatataagattcatatttacttcttatacatttgataaagtaaggcatggttgtggttaatctggtttatttttgttccacaagttaaataaatcataaaacttga

SEQ ID NO: 771 - DNA, 1698 bp, synthetic construct
  misc_feature 1..1698: note = encodes HLA-A*02:01:01:01
  source 1..1698: mol_type = other DNA
cagaagcagaggggtcagggcgaagtcccagggccccaggcgtggctctcagggtctcaggccccgaaggcggtgtatggattggggagtcccagccttggggattccccaactccgcagtttcttttctccctctcccaacctatgtagggtccttcttcctggatactcacgacgcggacccagttctcactcccattgggtgtcgggtttccagagaagccaatcagtgtcgtcgcggtcgcggttctaaagtccgcacgcacccaccgggactcagattctccccagacgccgaggatggccgtcatggcgccccgaaccctcgtcctgctactctcgggggctctggccctgacccagacctgggcgggctctcactccatgaggtatttcttcacatccgtgtcccggcccggccgcggggagccccgcttcatcgcagtgggctacgtggacgacacgcagttcgtgcggttcgacagcgacgccgcgagccagaggatggagccgcgggcgccgtggatagagcaggagggtccggagtattgggacggggagacacggaaagtgaaggcccactcacagactcaccgagtggacctggggaccctgcgcggctactacaaccagagcgaggccggttctcacaccgtccagaggatgtatggctgcgacgtggggtcggactggcgcttcctccgcgggtaccaccagtacgcctacgacggcaaggattacatcgccctgaaagaggacctgcgctcttggaccgcggcggacatggcagctcagaccaccaagcacaagtgggaggcggcccatgtggcggagcagttgagagcctacctggagggcacgtgcgtggagtggctccgcagatacctggagaacgggaaggagacgctgcagcgcacggacgcccccaaaacgcatatgactcaccacgctgtctctgaccatgaagccaccctgaggtgctgggccctgagcttctaccctgcggagatcacactgacctggcagcgggatggggaggaccagacccaggacacggagctcgtggagaccaggcctgcaggggatggaaccttccagaagtgggcggctgtggtggtgccttctggacaggagcagagatacacctgccatgtgcagcatgagggtttgcccaagcccctcaccctgagatgggagccgtcttcccagcccaccatccccatcgtgggcatcattgctggcctggttctctttggagctgtgatcactggagctgtggtcgctgctgtgatgtggaggaggaagagctcagatagaaaaggagggagctactctcaggctgcaagcagtgacagtgcccagggctctgatgtgtctctcacagcttgtaaagtgtgagacagctgccttgtgtgggactgagaggcaagagttgttcctgcccttccctttgtgacttgaagaaccctgactttgtttctgcaaaggcacctgcatgtgtctgtgttcgtgtaggcataatgtgaggaggtggggagaccaccccacccccatgtccaccatgaccctcttcccacgctgacctgtgctccctccccaatcatctttcctgttccagagaggtggggctgaggtgtctccatctctgtctcaacttcatggtgcactgagctgtaacttcttccttccctattaaaa

SEQ ID NO: 772 - DNA, 3217 bp, Homo sapiens
  source 1..3217: mol_type = unassigned DNA
atggccgtcatggcgccccgaaccctcgtcctgctactctcgggggctctggccctgacccagacctgggcgggtgagtgcggggtcgggagggaaacggcctctgtggggagaagcaacgggcccgcctggcgggggcgcaggacccgggaagccgcgccgggaggagggtcgggcgggtctcagccactcctcgtccccaggctctcactccatgaggtatttcttcacatccgtgtcccggcccggccgcggggagccccgcttcatcgcagtgggctacgtggacgacacgcagttcgtgcggttcgacagcgacgccgcgagccagaggatggagccgcgggcgccgtggatagagcaggagggtccggagtattgggacggggagacacggaaagtgaaggcccactcacagactcaccgagtggacctggggaccctgcgcggctactacaaccagagcgaggccggtgagtgaccccggcccggggcgcaggtcacgacctctcatcccccacggacgggccaggtcgcccacagtctccgggtccgagatccgccccgaagccgcgggaccccgagacccttgccccgggagaggcccaggcgcctttacccggtttcattttcagtttaggccaaaaatccccccaggttggtcggggcggggcggggctcgggggaccgggctgaccgcggggtccgggccaggttctcacaccgtccagaggatgtatggctgcgacgtggggtcggactggcgcttcctccgcgggtaccaccagtacgcctacgacggcaaggattacatcgccctgaaagaggacctgcgctctttgaccgcggcggacatggcagctcagaccaccaagcacaagtgggaggcggcccatgtggcggagcagttgagagcctacctggagggcacgtgcgtggagtggctccgcagatacctggagaacgggaaggagacgctgcagcgcacgggtaccaggggccacggggcgcctccctgatcgcctgtagatctcccgggctggcctcccacaaggaggggagacaattgggaccaacactagaatatcgccctccctctggtcctgagggagaggaatcctcctgggtttccagatcctgtaccagagagtgactctgaggttccgccctgctctctgacacaattaagggataaaatctctgaaggaatgacgggaagacgatccctcgaatactgatgagtggttccctttgacacacacaggcagcagccttgggcccgtgacttttcctctcaggccttgttctctgcttcacactcaatgtgtgtgggggtctgagtccagcacttctgagtccttcagcctccactcaggtcaggaccagaagtcgctgttccctcttcagggactagaattttccacggaataggagattatcccaggtgcctgtgtccaggctggtgtctgggttctgtgctcccttccccatcccaggtgtcctgtccattctcaagatagccacatgtgtgctggaggagtgtcccatgacagatgcaaaatgcctgaatgatctgactcttcctgacagacgcccccaaaacgcatatgactcaccacgctgtctctgaccatgaagccaccctgaggtgctgggccctgagcttctaccctgcggagatcacactgacctggcagcgggatggggaggaccagacccaggacacggagctcgtggagaccaggcctgcaggggatggaaccttccagaagtgggcggctgtggtggtgccttctggacaggagcagagatacacctgccatgtgcagcatgagggtttgcccaagcccctcaccctgagatggggtaaggagggagacgggggtgtcatgtcttttagggaaagcaggagcctctctgacctttagcagggtcagggcccctcaccttcccctcttttcccagagccgtcttcccagcccaccatccccatcgtgggcatcattgctggcctggttctctttggagctgtgatcactggagctgtggtcgctgctgtgatgtggaggaggaagagctcaggtggggaaggggtgaagggtgggtctgagatttcttgtctcactgagggttccaagacccaggtagaagtgtgccctgcctcgttactgggaagcaccacccacaattatgggcctacccagcctgggccctgtgtgccagcacttactcttttgtaaagcacctgttaaaatgaaggacagatttatcaccttgattacagcggtgatgggacctgatcccagcagtcacaagtcacaggggaaggtccctgaggaccttcaggagggcggttggtccaggacccacacctgctttcttcatgtttcctgatcccgccctgggtctgcagtcacacatttctggaaacttctctgaggtccaagacttggaggttcctctaggaccttaaggccctgactcctttctggtatctcacaggacattttcttcccacagatagaaaaggagggagctactctcaggctgcaagtaagtatgaaggaggctgatgcctgaggtccttgggatattgtgtttgggagcccatgggggagctcacccaccccacaattcctcctctagccacatcttctgtgggatctgaccaggttctgtttttgttctaccccaggcagtgacagtgcccagggctctgatgtgtctctcacagcttgtaaaggtgagagcctggagggcctgatgtgtgttgggtgttgggcggaacagtggacacagctgtgctatggggtttctttccattggatgtattgagcatgcgatgggctgtttaaagtgtgacccctcactgtgacagatacgaatttgttcatgaatatttttttctatagtgtgagacagctgccttgtgtgggactgagaggcaagagttgttcctgcccttccctttgtgacttgaagaaccctgactttgtttctgcaaaggcacctgcatgtgtctgtgttcgtgtaggcataatgtgaggaggtggggagaccaccccacccccatgtccaccatgaccctcttcccacgctgacctgtgctccctccccaatcatctttcctgttccagagaggtggggctgaggtgtctccatctctgtctcaacttcatggtgcactgagctgtaacttcttccttccctattaaaa

SEQ ID NO: 773 - DNA, 83 bp, synthetic construct
  misc_feature 1..83: note = encodes scaffold sequence
  source 1..83: mol_type = other DNA
gttttagagctagaaatagcaagttaaaataaggctagtccgttatcaacttgaaaaagtggcaccgagtcggtgcttttttt

SEQ ID NO: 774 - DNA, 20 bp, synthetic construct
  misc_feature 1..20: note = Guide Nucleic Acid Targeting Sequence
  source 1..20: mol_type = other DNA
tggacgacacgcagttcgtg

SEQ ID NO: 775 - DNA, 20 bp, synthetic construct
  misc_feature 1..20: note = Guide Nucleic Acid Targeting Sequence
  source 1..20: mol_type = other DNA
cagatacctggagaacggga

SEQ ID NO: 776 - DNA, 20 bp, synthetic construct
  misc_feature 1..20: note = Guide Nucleic Acid Targeting Sequence
  source 1..20: mol_type = other DNA
tcccgttctccaggtatctg

SEQ ID NO: 777 - DNA, 20 bp, synthetic construct
  misc_feature 1..20: note = Guide Nucleic Acid Targeting Sequence
  source 1..20: mol_type = other DNA
ccgccgcggtccaagagcgc

SEQ ID NO: 778 - DNA, 20 bp, synthetic construct
  misc_feature 1..20: note = Guide Nucleic Acid Targeting Sequence
  source 1..20: mol_type = other DNA
cctgcgctcttggaccgcgg

SEQ ID NO: 779 - DNA, 21 bp, synthetic construct
  misc_feature 1..21: note = Guide Nucleic Acid Targeting Sequence
  source 1..21: mol_type = other DNA
ggacctgcgctcttggaccgc

SEQ ID NO: 780 - DNA, 23 bp, synthetic construct
  misc_feature 1..23: note = Guide Nucleic Acid Targeting Sequence
  source 1..23: mol_type = other DNA
aaggagacgctgcagcgcacggg

SEQ ID NO: 781 - DNA, 23 bp, synthetic construct
  misc_feature 1..23: note = Guide Nucleic Acid Targeting Sequence
  source 1..23: mol_type = other DNA
gaaggagacgctgcagcgcacgg

SEQ ID NO: 782 - DNA, 23 bp, synthetic construct
  misc_feature 1..23: note = Guide Nucleic Acid Targeting Sequence
  source 1..23: mol_type = other DNA
gcgggcgccgtggatagagcagg

SEQ ID NO: 783 - DNA, 23 bp, synthetic construct
  misc_feature 1..23: note = Guide Nucleic Acid Targeting Sequence
  source 1..23: mol_type = other DNA
tgctctatccacggcgcccgcgg

SEQ ID NO: 784 - DNA, 23 bp, synthetic construct
  misc_feature 1..23: note = Guide Nucleic Acid Targeting Sequence
  source 1..23: mol_type = other DNA
cgatgaagcggggctccccgcgg

SEQ ID NO: 785 - DNA, 23 bp, synthetic construct
  misc_feature 1..23: note = Guide Nucleic Acid Targeting Sequence
  source 1..23: mol_type = other DNA
cgtgtcccggcccggccgcgggg

SEQ ID NO: 786 - DNA, 23 bp, synthetic construct
  misc_feature 1..23: note = Guide Nucleic Acid Targeting Sequence
  source 1..23: mol_type = other DNA
cggctccatcctctggctcgcgg

SEQ ID NO: 787 - DNA, 23 bp, synthetic construct
  misc_feature 1..23: note = Guide Nucleic Acid Targeting Sequence
  source 1..23: mol_type = other DNA
gatgtaatccttgccgtcgtagg

SEQ ID NO: 788 - DNA, 23 bp, synthetic construct
  misc_feature 1..23: note = Guide Nucleic Acid Targeting Sequence
  source 1..23: mol_type = other DNA
acagcgacgccgcgagccagagg

SEQ ID NO: 789 - DNA, 23 bp, synthetic construct
  misc_feature 1..23: note = Guide Nucleic Acid Targeting Sequence
  source 1..23: mol_type = other DNA
ggatggagccgcgggcgccgtgg

SEQ ID NO: 790 - DNA, 23 bp, synthetic construct
  misc_feature 1..23: note = Guide Nucleic Acid Targeting Sequence
  source 1..23: mol_type = other DNA
ggcgccgtggatagagcaggagg

SEQ ID NO: 791 - DNA, 23 bp, synthetic construct
  misc_feature 1..23: note = Guide Nucleic Acid Targeting Sequence
  source 1..23: mol_type = other DNA
gcgccgtggatagagcaggaggg

SEQ ID NO: 792 - DNA, 23 bp, synthetic construct
  misc_feature 1..23: note = Guide Nucleic Acid Targeting Sequence
  source 1..23: mol_type = other DNA
cggctactacaaccagagcgagg

SEQ ID NO: 793 - DNA, 23 bp, synthetic construct
  misc_feature 1..23: note = Guide Nucleic Acid Targeting Sequence
  source 1..23: mol_type = other DNA
ctggttgtagtagccgcgcaggg

SEQ ID NO: 794 - DNA, 23 bp, synthetic construct
  misc_feature 1..23: note = Guide Nucleic Acid Targeting Sequence
  source 1..23: mol_type = other DNA
tactacaaccagagcgaggccgg

SEQ ID NO: 795 - DNA, 23 bp, synthetic construct
  misc_feature 1..23: note = Guide Nucleic Acid Targeting Sequence
  source 1..23: mol_type = other DNA
ctacctggagggcacgtgcgtgg

SEQ ID NO: 796 - DNA, 23 bp, synthetic construct
  misc_feature 1..23: note = Guide Nucleic Acid Targeting Sequence
  source 1..23: mol_type = other DNA
cacgcacgtgccctccaggtagg

SEQ ID NO: 797 - DNA, 23 bp, synthetic construct
  misc_feature 1..23: note = Guide Nucleic Acid Targeting Sequence
  source 1..23: mol_type = other DNA
gcagggtccccaggtccactcgg

SEQ ID NO: 798 - DNA, 23 bp, synthetic construct
  misc_feature 1..23: note = Guide Nucleic Acid Targeting Sequence
  source 1..23: mol_type = other DNA
gtggacctggggaccctgcgcgg

SEQ ID NO: 799 - DNA, 23 bp, synthetic construct
  misc_feature 1..23: note = Guide Nucleic Acid Targeting Sequence
  source 1..23: mol_type = other DNA
tggagggcacgtgcgtggagtgg

SEQ ID NO: 800 - DNA, 23 bp, synthetic construct
  misc_feature 1..23: note = Guide Nucleic Acid Targeting Sequence
  source 1..23: mol_type = other DNA
gtatggctgcgacgtggggtcgg

SEQ ID NO: 801 - DNA, 23 bp, synthetic construct
  misc_feature 1..23: note = Guide Nucleic Acid Targeting Sequence
  source 1..23: mol_type = other DNA
ctgagctgccatgtccgccgcgg

SEQ ID NO: 802 - DNA, 23 bp, synthetic construct
  misc_feature 1..23: note = Guide Nucleic Acid Targeting Sequence
  source 1..23: mol_type = other DNA
ggattacatcgccctgaaagagg

SEQ ID NO: 803 - DNA, 23 bp, synthetic construct
  misc_feature 1..23: note = Guide Nucleic Acid Targeting Sequence
  source 1..23: mol_type = other DNA
caagtgggaggcggcccatgtgg

SEQ ID NO: 804 - DNA, 23 bp, synthetic construct
  misc_feature 1..23: note = Guide Nucleic Acid Targeting Sequence
  source 1..23: mol_type = other DNA
gtgggaggcggcccatgtggcgg

SEQ ID NO: 805 - DNA, 23 bp, synthetic construct
  misc_feature 1..23: note = Guide Nucleic Acid Targeting Sequence
  source 1..23: mol_type = other DNA
cagttgagagcctacctggaggg

SEQ ID NO: 806 - DNA, 23 bp, synthetic construct
  misc_feature 1..23: note = Guide Nucleic Acid Targeting Sequence
  source 1..23: mol_type = other DNA
gcagttgagagcctacctggagg

SEQ ID NO: 807 - DNA, 23 bp, synthetic construct
  misc_feature 1..23: note = Guide Nucleic Acid Targeting Sequence
  source 1..23: mol_type = other DNA
taccaccagtacgcctacgacgg

SEQ ID NO: 808 - DNA, 23 bp, synthetic construct
  misc_feature 1..23: note = Guide Nucleic Acid Targeting Sequence
  source 1..23: mol_type = other DNA
tgccgtcgtaggcgtactggtgg

SEQ ID NO: 809 - DNA, 23 bp, synthetic construct
  misc_feature 1..23: note = Guide Nucleic Acid Targeting Sequence
  source 1..23: mol_type = other DNA
ccagtacgcctacgacggcaagg

SEQ ID NO: 810 - DNA, 23 bp, synthetic construct
  misc_feature 1..23: note = Guide Nucleic Acid Targeting Sequence
  source 1..23: mol_type = other DNA
ggatgtgaagaaatacctcatgg

SEQ ID NO: 811 - DNA, 23 bp, synthetic construct
  misc_feature 1..23: note = Guide Nucleic Acid Targeting Sequence
  source 1..23: mol_type = other DNA
atttcttcacatccgtgtcccgg

SEQ ID NO: 812 - DNA, 23 bp, synthetic construct
  misc_feature 1..23: note = Guide Nucleic Acid Targeting Sequence
  source 1..23: mol_type = other DNA
aggcgtactggtggtacccgcgg

SEQ ID NO: 813 - DNA, 23 bp, synthetic construct
  misc_feature 1..23: note = Guide Nucleic Acid Targeting Sequence
  source 1..23: mol_type = other DNA
cgtactggtggtacccgcggagg

SEQ ID NO: 814 - DNA, 23 bp, synthetic construct
  misc_feature 1..23: note = Guide Nucleic Acid Targeting Sequence
  source 1..23: mol_type = other DNA
gaggatgtatggctgcgacgtgg

SEQ ID NO: 815 - DNA, 23 bp, synthetic construct
  misc_feature 1..23: note = Guide Nucleic Acid Targeting Sequence
  source 1..23: mol_type = other DNA
ggatgtatggctgcgacgtgggg

SEQ ID NO: 816 - DNA, 23 bp, synthetic construct
  misc_feature 1..23: note = Guide Nucleic Acid Targeting Sequence
  source 1..23: mol_type = other DNA
ctcagaccaccaagcacaagtgg

SEQ ID NO: 817 - DNA, 23 bp, synthetic construct
  misc_feature 1..23: note = Guide Nucleic Acid Targeting Sequence
  source 1..23: mol_type = other DNA
tcagaccaccaagcacaagtggg

SEQ ID NO: 818 - DNA, 23 bp, synthetic construct
  misc_feature 1..23: note = Guide Nucleic Acid Targeting Sequence
  source 1..23: mol_type = other DNA
caccaagcacaagtgggaggcgg

SEQ ID NO: 819 - DNA, 23 bp, synthetic construct
  misc_feature 1..23: note = Guide Nucleic Acid Targeting Sequence
  source 1..23: mol_type = other DNA
gaccaccaagcacaagtgggagg

SEQ ID NO: 820 - DNA, 23 bp, synthetic construct
  misc_feature 1..23: note = Guide Nucleic Acid Targeting Sequence
  source 1..23: mol_type = other DNA
gagccccgcttcatcgcagtggg

SEQ ID NO: 821 - DNA, 23 bp, synthetic construct
  misc_feature 1..23: note = Guide Nucleic Acid Targeting Sequence
  source 1..23: mol_type = other DNA
gtagcccactgcgatgaagcggg

SEQ ID NO: 822 - DNA, 23 bp, synthetic construct
  misc_feature 1..23: note = Guide Nucleic Acid Targeting Sequence
  source 1..23: mol_type = other DNA
tagcccactgcgatgaagcgggg

SEQ ID NO: 823 - DNA, 23 bp, synthetic construct
  misc_feature 1..23: note = Guide Nucleic Acid Targeting Sequence
  source 1..23: mol_type = other DNA
cgtagcccactgcgatgaagcgg

SEQ ID NO: 824 - DNA, 23 bp, synthetic construct
  misc_feature 1..23: note = Guide Nucleic Acid Targeting Sequence
  source 1..23: mol_type = other DNA
cttcatcgcagtgggctacgtgg

SEQ ID NO: 825 - DNA, 23 bp, synthetic construct
  misc_feature 1..23: note = Guide Nucleic Acid Targeting Sequence
  source 1..23: mol_type = other DNA
ggagccccgcttcatcgcagtgg

SEQ ID NO: 826 - DNA, 23 bp, synthetic construct
  misc_feature 1..23: note = Guide Nucleic Acid Targeting Sequence
  source 1..23: mol_type = other DNA
cggggagacacggaaagtgaagg

SEQ ID NO: 827 - DNA, 23 bp, synthetic construct
  misc_feature 1..23: note = Guide Nucleic Acid Targeting Sequence
  source 1..23: mol_type = other DNA
agtattgggacggggagacacgg

SEQ ID NO: 828 - DNA, 23 bp, synthetic construct
  misc_feature 1..23: note = Guide Nucleic Acid Targeting Sequence
  source 1..23: mol_type = other DNA
agggtccggagtattgggacggg

SEQ ID NO: 829 - DNA, 23 bp, synthetic construct
  misc_feature 1..23: note = Guide Nucleic Acid Targeting Sequence
  source 1..23: mol_type = other DNA
gagggtccggagtattgggacgg

SEQ ID NO: 830 - DNA, 23 bp, synthetic construct
  misc_feature 1..23: note = Guide Nucleic Acid Targeting Sequence
  source 1..23: mol_type = other DNA
ggaccctcctgctctatccacgg

SEQ ID NO: 831 - DNA, 23 bp, synthetic construct
  misc_feature 1..23: note = Guide Nucleic Acid Targeting Sequence
  source 1..23: mol_type = other DNA
gtggatagagcaggagggtccgg

SEQ ID NO: 832 - DNA, 23 bp, synthetic construct
  misc_feature 1..23: note = Guide Nucleic Acid Targeting Sequence
  source 1..23: mol_type = other DNA
agactcaccgagtggacctgggg

SEQ ID NO: 833 - DNA, 23 bp, synthetic construct
  misc_feature 1..23: note = Guide Nucleic Acid Targeting Sequence
  source 1..23: mol_type = other DNA
cactcggtgagtctgtgagtggg

SEQ ID NO: 834 - DNA, 23 bp, synthetic construct
  misc_feature 1..23: note = Guide Nucleic Acid Targeting Sequence
  source 1..23: mol_type = other DNA
cagactcaccgagtggacctggg

SEQ ID NO: 835 - DNA, 23 bp, synthetic construct
  misc_feature 1..23: note = Guide Nucleic Acid Targeting Sequence
  source 1..23: mol_type = other DNA
ccactcacagactcaccgagtgg

SEQ ID NO: 836 - DNA, 23 bp, synthetic construct
  misc_feature 1..23: note = Guide Nucleic Acid Targeting Sequence
  source 1..23: mol_type = other DNA
ccactcggtgagtctgtgagtgg

SEQ ID NO: 837 - DNA, 23 bp, synthetic construct
  misc_feature 1..23: note = Guide Nucleic Acid Targeting Sequence
  source 1..23: mol_type = other DNA
tcggactggcgcttcctccgcgg

SEQ ID NO: 838 - DNA, 23 bp, synthetic construct
  misc_feature 1..23: note = Guide Nucleic Acid Targeting Sequence
  source 1..23: mol_type = other DNA
gcagccatacatcctctggacgg

SEQ ID NO: 839 - DNA, 23 bp, synthetic construct
  misc_feature 1..23: note = Guide Nucleic Acid Targeting Sequence
  source 1..23: mol_type = other DNA
tctcaactgctccgccacatggg

SEQ ID NO: 840 - DNA, 23 bp, synthetic construct
  misc_feature 1..23: note = Guide Nucleic Acid Targeting Sequence
  source 1..23: mol_type = other DNA
accctcatgctgcacatggcagg

SEQ ID NO: 841 - DNA, 23 bp, synthetic construct
  misc_feature 1..23: note = Guide Nucleic Acid Targeting Sequence
  source 1..23: mol_type = other DNA
acctgccatgtgcagcatgaggg

SEQ ID NO: 842 - DNA, 23 bp, synthetic construct
  misc_feature 1..23: note = Guide Nucleic Acid Targeting Sequence
  source 1..23: mol_type = other DNA
cacctgccatgtgcagcatgagg

SEQ ID NO: 843 - DNA, 23 bp, synthetic construct
  misc_feature 1..23: note = Guide Nucleic Acid Targeting Sequence
  source 1..23: mol_type = other DNA
ggaggaccagacccaggacacgg

SEQ ID NO: 844 - DNA, 23 bp, synthetic construct
  misc_feature 1..23: note = Guide Nucleic Acid Targeting Sequence
  source 1..23: mol_type = other DNA
ggatggggaggaccagacccagg

SEQ ID NO: 845 - DNA, 23 bp, synthetic construct
  misc_feature 1..23: note = Guide Nucleic Acid Targeting Sequence
  source 1..23: mol_type = other DNA
gacctggcagcgggatggggagg

SEQ ID NO: 846 - DNA, 23 bp, synthetic construct
  misc_feature 1..23: note = Guide Nucleic Acid Targeting Sequence
  source 1..23: mol_type = other DNA
agatcacactgacctggcagcgg

SEQ ID NO: 847 - DNA, 23 bp, synthetic construct
  misc_feature 1..23: note = Guide Nucleic Acid Targeting Sequence
  source 1..23: mol_type = other DNA
gatcacactgacctggcagcggg

SEQ ID NO: 848 - DNA, 23 bp, synthetic construct
  misc_feature 1..23: note = Guide Nucleic Acid Targeting Sequence
  source 1..23: mol_type = other DNA
aggtcagtgtgatctccgcaggg

SEQ ID NO: 849 - DNA, 23 bp, synthetic construct
  misc_feature 1..23: note = Guide Nucleic Acid Targeting Sequence
  source 1..23: mol_type = other DNA
aagcccctcaccctgagatgggg

SEQ ID NO: 850 - DNA, 23 bp, synthetic construct
  misc_feature 1..23: note = Guide Nucleic Acid Targeting Sequence
  source 1..23: mol_type = other DNA
ctgcggagatcacactgacctgg

SEQ ID NO: 851 - DNA, 23 bp, synthetic construct
  misc_feature 1..23: note = Guide Nucleic Acid Targeting Sequence
  source 1..23: mol_type = other DNA
cagcaatgatgcccacgatgggg

SEQ ID NO: 852 - DNA, 23 bp, synthetic construct
  misc_feature 1..23: note = Guide Nucleic Acid Targeting Sequence
  source 1..23: mol_type = other DNA
ccagcaatgatgcccacgatggg

SEQ ID NO: 853 - DNA, 23 bp, synthetic construct
  misc_feature 1..23: note = Guide Nucleic Acid Targeting Sequence
  source 1..23: mol_type = other DNA
gccagcaatgatgcccacgatgg

SEQ ID NO: 854 - DNA, 23 bp, synthetic construct
  misc_feature 1..23: note = Guide Nucleic Acid Targeting Sequence
  source 1..23: mol_type = other DNA
ggatggaaccttccagaagtggg

SEQ ID NO: 855 - DNA, 23 bp, synthetic construct
  misc_feature 1..23: note = Guide Nucleic Acid Targeting Sequence
  source 1..23: mol_type = other DNA
gggatggaaccttccagaagtgg

SEQ ID NO: 856 - DNA, 23 bp, synthetic construct
  misc_feature 1..23: note = Guide Nucleic Acid Targeting Sequence
  source 1..23: mol_type = other DNA
atgcccacgatggggatggtggg

SEQ ID NO: 857 - DNA, 23 bp, synthetic construct
  misc_feature 1..23: note = Guide Nucleic Acid Targeting Sequence
  source 1..23: mol_type = other DNA
cagcccaccatccccatcgtggg

SEQ ID NO: 858 - DNA, 23 bp, synthetic construct
  misc_feature 1..23: note = Guide Nucleic Acid Targeting Sequence
  source 1..23: mol_type = other DNA
ccagcccaccatccccatcgtgg

SEQ ID NO: 859 - DNA, 23 bp, synthetic construct
  misc_feature 1..23: note = Guide Nucleic Acid Targeting Sequence
  source 1..23: mol_type = other DNA
gatgcccacgatggggatggtgg

SEQ ID NO: 860 - DNA, 23 bp, synthetic construct
  misc_feature 1..23: note = Guide Nucleic Acid Targeting Sequence
  source 1..23: mol_type = other DNA
cagggcccagcacctcagggtgg

SEQ ID NO: 861 - DNA, 23 bp, synthetic construct
  misc_feature 1..23: note = Guide Nucleic Acid Targeting Sequence
  source 1..23: mol_type = other DNA
aatgatgcccacgatggggatgg

SEQ ID NO: 862 - DNA, 23 bp, synthetic construct
  misc_feature 1..23: note = Guide Nucleic Acid Targeting Sequence
  source 1..23: mol_type = other DNA
ggccctgacccagacctgggcgg

SEQ ID NO: 863 - DNA, 23 bp, synthetic construct
  misc_feature 1..23: note = Guide Nucleic Acid Targeting Sequence
  source 1..23: mol_type = other DNA
gacccaggacacggagctcgtgg

SEQ ID NO: 864 - DNA, 23 bp, synthetic construct
  misc_feature 1..23: note = Guide Nucleic Acid Targeting Sequence
  source 1..23: mol_type = other DNA
acacggagctcgtggagaccagg

SEQ ID NO: 865 - DNA, 23 bp, synthetic construct
  misc_feature 1..23: note = Guide Nucleic Acid Targeting Sequence
  source 1..23: mol_type = other DNA
cgtggagaccaggcctgcagggg

SEQ ID NO: 866 - DNA, 23 bp, synthetic construct
  misc_feature 1..23: note = Guide Nucleic Acid Targeting Sequence
  source 1..23: mol_type = other DNA
tcgtggagaccaggcctgcaggg

SEQ ID NO: 867 - DNA, 23 bp, synthetic construct
  misc_feature 1..23: note = Guide Nucleic Acid Targeting Sequence
  source 1..23: mol_type = other DNA
agctgtgatcactggagctgtgg

SEQ ID NO: 868 - DNA, 23 bp, synthetic construct
  misc_feature 1..23: note = Guide Nucleic Acid Targeting Sequence
  source 1..23: mol_type = other DNA
aaaaggagggagctactctcagg

SEQ ID NO: 869 - DNA, 23 bp, synthetic construct
  misc_feature 1..23: note = Guide Nucleic Acid Targeting Sequence
  source 1..23: mol_type = other DNA
atgtggaggaggaagagctcagg

SEQ ID NO: 870 - DNA, 23 bp, synthetic construct
  misc_feature 1..23: note = Guide Nucleic Acid Targeting Sequence
  source 1..23: mol_type = other DNA
gtgtctctcacagcttgtaaagg

SEQ ID NO: 871 - DNA, 23 bp, synthetic construct
  misc_feature 1..23: note = Guide Nucleic Acid Targeting Sequence
  source 1..23: mol_type = other DNA
gagagacacatcagagccctggg

SEQ ID NO: 872 - DNA, 23 bp, synthetic construct
  misc_feature 1..23: note = Guide Nucleic Acid Targeting Sequence
  source 1..23: mol_type = other DNA
ctccgcagggtagaagctcaggg

SEQ ID NO: 873 - DNA, 23 bp, synthetic construct
  misc_feature 1..23: note = Guide Nucleic Acid Targeting Sequence
  source 1..23: mol_type = other DNA
ggccctgagcttctaccctgcgg

SEQ ID NO: 874 - DNA, 23 bp, synthetic construct
  misc_feature 1..23: note = Guide Nucleic Acid Targeting Sequence
  source 1..23: mol_type = other DNA
gctcagggcccagcacctcaggg

SEQ ID NO: 875 - DNA, 23 bp, synthetic construct
  misc_feature 1..23: note = Guide Nucleic Acid Targeting Sequence
  source 1..23: mol_type = other DNA
tatctctgctcctgtccagaagg

SEQ ID NO: 876 - DNA, 23 bp, synthetic construct
  misc_feature 1..23: note = Guide Nucleic Acid Targeting Sequence
  source 1..23: mol_type = other DNA
agtagcaggacgagggttcgggg

SEQ ID NO: 877 - DNA, 23 bp, synthetic construct
  misc_feature 1..23: note = Guide Nucleic Acid Targeting Sequence
  source 1..23: mol_type = other DNA
ccccgagagtagcaggacgaggg

SEQ ID NO: 878 - DNA, 23 bp, synthetic construct
  misc_feature 1..23: note = Guide Nucleic Acid Targeting Sequence
  source 1..23: mol_type = other DNA
ccctcgtcctgctactctcgggg

SEQ ID NO: 879 - DNA, 23 bp, synthetic construct
  misc_feature 1..23: note = Guide Nucleic Acid Targeting Sequence
  source 1..23: mol_type = other DNA
cctcgtcctgctactctcggggg

SEQ ID NO: 880 - DNA, 23 bp, synthetic construct
  misc_feature 1..23: note = Guide Nucleic Acid Targeting Sequence
  source 1..23: mol_type = other DNA
ctgtggtcgctgctgtgatgtgg

SEQ ID NO: 881 - DNA, 23 bp, synthetic construct
  misc_feature 1..23: note = Guide Nucleic Acid Targeting Sequence
  source 1..23: mol_type = other DNA
tcgctgctgtgatgtggaggagg

SEQ ID NO: 882 - DNA, 23 bp, synthetic construct
  misc_feature 1..23: note = Guide Nucleic Acid Targeting Sequence
  source 1..23: mol_type = other DNA
tggtcgctgctgtgatgtggagg

SEQ ID NO: 883 - DNA, 23 bp, synthetic construct
  misc_feature 1..23: note = Guide Nucleic Acid Targeting Sequence
  source 1..23: mol_type = other DNA
cacagccgcccacttctggaagg

SEQ ID NO: 884 - DNA, 23 bp, synthetic construct
  misc_feature 1..23: note = Guide Nucleic Acid Targeting Sequence
  source 1..23: mol_type = other DNA
ccagaagtgggcggctgtggtgg

SEQ ID NO: 885 - DNA, 23 bp, synthetic construct
  misc_feature 1..23: note = Guide Nucleic Acid Targeting Sequence
  source 1..23: mol_type = other DNA
tggaaccttccagaagtgggcgg

SEQ ID NO: 886 - DNA, 23 bp, synthetic construct
  misc_feature 1..23: note = Guide Nucleic Acid Targeting Sequence
  source 1..23: mol_type = other DNA
tcacagctccaaagagaaccagg

SEQ ID NO: 887 - DNA, 23 bp, synthetic construct
  misc_feature 1..23: note = Guide Nucleic Acid Targeting Sequence
  source 1..23: mol_type = other DNA
ctgaccatgaagccaccctgagg

SEQ ID NO: 888 - DNA, 23 bp, synthetic construct
  misc_feature 1..23: note = Guide Nucleic Acid Targeting Sequence
  source 1..23: mol_type = other DNA
gcaaaccctcatgctgcacatgg

SEQ ID NO: 889 - DNA, 23 bp, synthetic construct
  misc_feature 1..23: note = Guide Nucleic Acid Targeting Sequence
  source 1..23: mol_type = other DNA
tgaagccaccctgaggtgctggg

SEQ ID NO: 890 - DNA, 23 bp, synthetic construct
  misc_feature 1..23: note = Guide Nucleic Acid Targeting Sequence
  source 1..23: mol_type = other DNA
ggtgagtcatatgcgttttgggg

SEQ ID NO: 891 - DNA, 23 bp, synthetic construct
  misc_feature 1..23: note = Guide Nucleic Acid Targeting Sequence
  source 1..23: mol_type = other DNA
gtgagtcatatgcgttttggggg

SEQ ID NO: 892 - DNA, 23 bp, synthetic construct
  misc_feature 1..23: note = Guide Nucleic Acid Targeting Sequence
  source 1..23: mol_type = other DNA
cttcatggtcagagacagcgtgg

SEQ ID NO: 893 - DNA, 23 bp, synthetic construct
  misc_feature 1..23: note = Guide Nucleic Acid Targeting Sequence
  source 1..23: mol_type = other DNA
tctggccctgacccagacctggg

SEQ ID NO: 894 - DNA, 20 bp, synthetic construct
  misc_feature 1..20: note = sequence targeting B2M
  source 1..20: mol_type = other DNA
cgcgagcacagctaaggcca

SEQ ID NO: 895 - DNA, 20 bp, synthetic construct
  misc_feature 1..20: note = sequence targeting B2M
  source 1..20: mol_type = other DNA
gagtagcgcgagcacagcta

SEQ ID NO: 896 - DNA, 20 bp, synthetic construct
  misc_feature 1..20: note = sequence targeting B2M
  source 1..20: mol_type = other DNA
agggtaggagagactcacgc

SEQ ID NO: 897 - DNA, 20 bp, synthetic construct
  misc_feature 1..20: note = sequence targeting B2M
  source 1..20: mol_type = other DNA
ctgaatctttggagtacctg

SEQ ID NO: 898 - DNA, 20 bp, synthetic construct
  misc_feature 1..20: note = sequence targeting B2M
  source 1..20: mol_type = other DNA
tcacgtcatccagcagagaa

SEQ ID NO: 899 - DNA, 20 bp, synthetic construct
  misc_feature 1..20: note = sequence targeting B2M
  source 1..20: mol_type = other DNA
tcctgaattgctatgtgtct

SEQ ID NO: 900 - DNA, 20 bp, synthetic construct
  misc_feature 1..20: note = sequence targeting B2M
  source 1..20: mol_type = other DNA
aagtcaacttcaatgtcgga

SEQ ID NO: 901 - DNA, 20 bp, synthetic construct
  misc_feature 1..20: note = sequence targeting B2M
  source 1..20: mol_type = other DNA
gtcttttcccgatattcctc

SEQ ID NO: 902 - DNA, 20 bp, synthetic construct
  misc_feature 1..20: note = sequence targeting B2M
  source 1..20: mol_type = other DNA
tggagtacctgaggaatatc

SEQ ID NO: 903 - DNA, 20 bp, synthetic construct
  misc_feature 1..20: note = sequence targeting B2M
  source 1..20: mol_type = other DNA
cagcccaagatagttaagtg

SEQ ID NO: 904 - DNA, 20 bp, synthetic construct
  misc_feature 1..20: note = sequence targeting B2M
  source 1..20: mol_type = other DNA
acaaagtcacatggttcaca

SEQ ID NO: 905 - DNA, 20 bp, synthetic construct
  misc_feature 1..20: note = sequence targeting B2M
  source 1..20: mol_type = other DNA
actctctctttctggcctgg

SEQ ID NO: 906 - DNA, 20 bp, synthetic construct
  misc_feature 1..20: note = sequence targeting B2M
  source 1..20: mol_type = other DNA
tgggctgtgacaaagtcaca

SEQ ID NO: 907 - DNA, 20 bp, synthetic construct
  misc_feature 1..20: note = sequence targeting B2M
  source 1..20: mol_type = other DNA
ggccgagatgtctcgctccg

SEQ ID NO: 908 - DNA, 20 bp, synthetic construct
  misc_feature 1..20: note = sequence targeting B2M
  source 1..20: mol_type = other DNA
cagtaagtcaacttcaatgt

SEQ ID NO: 909 - DNA, 20 bp, synthetic construct
  misc_feature 1..20: note = sequence targeting B2M
  source 1..20: mol_type = other DNA
actcacgctggatagcctcc

SEQ ID NO: 910 - DNA, 20 bp, synthetic construct
  misc_feature 1..20: note = sequence targeting B2M
  source 1..20: mol_type = other DNA
catactcatctttttcagtg

SEQ ID NO: 911 - DNA, 20 bp, synthetic construct
  misc_feature 1..20: note = sequence targeting B2M
  source 1..20: mol_type = other DNA
cacagcccaagatagttaag

SEQ ID NO: 912 - DNA, 20 bp, synthetic construct
  misc_feature 1..20: note = sequence targeting B2M
  source 1..20: mol_type = other DNA
ttcagacttgtctttcagca

SEQ ID NO: 913 - DNA, 20 bp, synthetic construct
  misc_feature 1..20: note = sequence targeting B2M
  source 1..20: mol_type = other DNA
agtcacatggttcacacggc

SEQ ID NO: 914 - DNA, 20 bp, synthetic construct
  misc_feature 1..20: note = sequence targeting B2M
  source 1..20: mol_type = other DNA
atactcatctttttcagtgg

SEQ ID NO: 915 - DNA, 20 bp, synthetic construct
  misc_feature 1..20: note = sequence targeting B2M
  source 1..20: mol_type = other DNA
ggcatactcatctttttcag

SEQ ID NO: 916 - DNA, 20 bp, synthetic construct
  misc_feature 1..20: note = sequence targeting B2M
  source 1..20: mol_type = other DNA
acagcccaagatagttaagt

SEQ ID NO: 917 - DNA, 20 bp, synthetic construct
  misc_feature 1..20: note = sequence targeting B2M
  source 1..20: mol_type = other DNA
gctactctctctttctggcc

SEQ ID NO: 918 - DNA, 20 bp, synthetic construct
  misc_feature 1..20: note = sequence targeting B2M
  source 1..20: mol_type = other DNA
tggagagagaattgaaaaag

SEQ ID NO: 919 - DNA, 20 bp, synthetic construct
  misc_feature 1..20: note = sequence targeting B2M
  source 1..20: mol_type = other DNA
acttgtctttcagcaaggac

SEQ ID NO: 920 - DNA, 20 bp, synthetic construct
  misc_feature 1..20: note = sequence targeting B2M
  source 1..20: mol_type = other DNA
gaagttgacttactgaagaa

SEQ ID NO: 921 - DNA, 20 bp, synthetic construct
  misc_feature 1..20: note = sequence targeting B2M
  source 1..20: mol_type = other DNA
ggccacggagcgagacatct

SEQ ID NO: 922 - DNA, 20 bp, synthetic construct
  misc_feature 1..20: note = sequence targeting B2M
  source 1..20: mol_type = other DNA
gcatactcatctttttcagt

SEQ ID NO: 923 - DNA, 20 bp, synthetic construct
  misc_feature 1..20: note = sequence targeting B2M
  source 1..20: mol_type = other DNA
cgtgagtaaacctgaatctt

SEQ ID NO: 924 - DNA, 20 bp, synthetic construct
  misc_feature 1..20: note = sequence targeting B2M
  source 1..20: mol_type = other DNA
ttaccccacttaactatctt

SEQ ID NO: 925 - DNA, 20 bp, synthetic construct
  misc_feature 1..20: note = sequence targeting B2M
  source 1..20: mol_type = other DNA
ttggagtacctgaggaatat

SEQ ID NO: 926 - DNA, 20 bp, synthetic construct
  misc_feature 1..20: note = sequence targeting B2M
  source 1..20: mol_type = other DNA
acccagacacatagcaattc

SEQ ID NO: 927 - DNA, 20 bp, synthetic construct
  misc_feature 1..20: note = sequence targeting B2M
  source 1..20: mol_type = other DNA
tttgactttccattctctgc

SEQ ID NO: 928 - DNA, 20 bp, synthetic construct
  misc_feature 1..20: note = sequence targeting B2M
  source 1..20: mol_type = other DNA
ttcctgaattgctatgtgtc

SEQ ID NO: 929 - DNA, 20 bp, synthetic construct
  misc_feature 1..20: note = sequence targeting B2M
  source 1..20: mol_type = other DNA
ctcaggtactccaaagattc

SEQ ID NO: 930 - DNA, 20 bp, synthetic construct
  misc_feature 1..20: note = sequence targeting B2M
  source 1..20: mol_type = other DNA
cttaccccacttaactatct

SEQ ID NO: 931 - DNA, 20 bp, synthetic construct
  misc_feature 1..20: note = sequence targeting B2M
  source 1..20: mol_type = other DNA
ctcgcgctactctctctttc

SEQ ID NO: 932 - DNA, 20 bp, synthetic construct
  misc_feature 1..20: note = sequence targeting B2M
  source 1..20: mol_type = other DNA
tcgatctatgaaaaagacag

SEQ ID NO: 933 - DNA, 20 bp, synthetic construct
  misc_feature 1..20: note = sequence targeting B2M
  source 1..20: mol_type = other DNA
gagacatgtaagcagcatca

SEQ ID NO: 934 - DNA, 20 bp, synthetic construct
  misc_feature 1..20: note = sequence targeting B2M
  source 1..20: mol_type = other DNA
acatgtaagcagcatcatgg

SEQ ID NO: 935 - DNA, 20 bp, synthetic construct
  misc_feature 1..20: note = sequence targeting B2M
  source 1..20: mol_type = other DNA
gaagtcctagaatgagcgcc

SEQ ID NO: 936 - DNA, 20 bp, synthetic construct
  misc_feature 1..20: note = sequence targeting B2M
  source 1..20: mol_type = other DNA
gagcgcccggtgtcccaagc

SEQ ID NO: 937 - DNA, 20 bp, synthetic construct
  misc_feature 1..20: note = sequence targeting B2M
  source 1..20: mol_type = other DNA
agcgcccggtgtcccaagct

SEQ ID NO: 938 - DNA, 20 bp, synthetic construct
  misc_feature 1..20: note = sequence targeting B2M
  source 1..20: mol_type = other DNA
gcgcccggtgtcccaagctg

SEQ ID NO: 939 - DNA, 20 bp, synthetic construct
  misc_feature 1..20: note = sequence targeting B2M
  source 1..20: mol_type = other DNA
ctggggcgcgcaccccagat

SEQ ID NO: 940 - DNA, 20 bp, synthetic construct
  misc_feature 1..20: note = sequence targeting B2M
  source 1..20: mol_type = other DNA
gggcgcgcaccccagatcgg

SEQ ID NO: 941 - DNA, 20 bp, synthetic construct
  misc_feature 1..20: note = sequence targeting B2M
  source 1..20: mol_type = other DNA
ggcgcgcaccccagatcgga

SEQ ID NO: 942 - DNA, 20 bp, synthetic construct
  misc_feature 1..20: note = sequence targeting B2M
  source 1..20: mol_type = other DNA
catcacgagactctaagaaa

SEQ ID NO: 943 - DNA, 20 bp, synthetic construct
  misc_feature 1..20: note = sequence targeting B2M
  source 1..20: mol_type = other DNA
taagaaaaggaaactgaaaa

SEQ ID NO: 944 - DNA, 20 bp, synthetic construct
  misc_feature 1..20: note = sequence targeting B2M
  source 1..20: mol_type = other DNA
aagaaaaggaaactgaaaac

SEQ ID NO: 945 - DNA, 20 bp, synthetic construct
  misc_feature 1..20: note = sequence targeting B2M
  source 1..20: mol_type = other DNA
gaaagtccctctctctaacc

SEQ ID NO: 946 - DNA, 20 bp, synthetic construct
  misc_feature 1..20: note = sequence targeting B2M
  source 1..20: mol_type = other DNA
ctaacctggcactgcgtcgc

SEQ ID NO: 947 - DNA, 20 bp, synthetic construct
  misc_feature 1..20: note = sequence targeting B2M
  source 1..20: mol_type = other DNA
ctggcactgcgtcgctggct

SEQ ID NO: 948 - DNA, 20 bp, synthetic construct
  misc_feature 1..20: note = sequence targeting B2M
  source 1..20: mol_type = other DNA
tgcgtcgctggcttggagac

SEQ ID NO: 949 - DNA, 20 bp, synthetic construct
  misc_feature 1..20: note = sequence targeting B2M
  source 1..20: mol_type = other DNA
gctggcttggagacaggtga

SEQ ID NO: 950 - DNA, 20 bp, synthetic construct
  misc_feature 1..20: note = sequence targeting B2M
  source 1..20: mol_type = other DNA
gagacaggtgacggtccctg

SEQ ID NO: 951 - DNA, 20 bp, synthetic construct
  misc_feature 1..20: note = sequence targeting B2M
  source 1..20: mol_type = other DNA
agacaggtgacggtccctgc

SEQ ID NO: 952 - DNA, 20 bp, synthetic construct
  misc_feature 1..20: note = sequence targeting B2M
  source 1..20: mol_type = other DNA
cctgcgggccttgtcctgat

SEQ ID NO: 953 - DNA, 20 bp, synthetic construct
  misc_feature 1..20: note = sequence targeting B2M
  source 1..20: mol_type = other DNA
cgggccttgtcctgattggc

SEQ ID NO: 954 - DNA, 20 bp, synthetic construct
  misc_feature 1..20: note = sequence targeting B2M
  source 1..20: mol_type = other DNA
gggccttgtcctgattggct

SEQ ID NO: 955 - DNA, 20 bp, synthetic construct
  misc_feature 1..20: note = sequence targeting B2M
  source 1..20: mol_type = other DNA
gggcacgcgtttaatataag

SEQ ID NO: 956 - DNA, 20 bp, synthetic construct
  misc_feature 1..20: note = sequence targeting B2M
  source 1..20: mol_type = other DNA
cacgcgtttaatataagtgg

SEQ ID NO: 957 - DNA, 20 bp, synthetic construct
  misc_feature 1..20: note = sequence targeting B2M
  source 1..20: mol_type = other DNA
tataagtggaggcgtcgcgc

SEQ ID NO: 958 - DNA, 20 bp, synthetic construct
  misc_feature 1..20: note = sequence targeting B2M
  source 1..20: mol_type = other DNA
aagtggaggcgtcgcgctgg

SEQ ID NO: 959 - DNA, 20 bp, synthetic construct
  misc_feature 1..20: note = sequence targeting B2M
  source 1..20: mol_type = other DNA
agtggaggcgtcgcgctggc

SEQ ID NO: 960 - DNA, 20 bp, synthetic construct
  misc_feature 1..20: note = sequence targeting B2M
  source 1..20: mol_type = other DNA
ttcctgaagctgacagcatt

SEQ ID NO: 961 - DNA, 20 bp, synthetic construct
  misc_feature 1..20: note = sequence targeting B2M
  source 1..20: mol_type = other DNA
tcctgaagctgacagcattc

SEQ ID NO: 962 - DNA, 20 bp, synthetic construct
  misc_feature 1..20: note = sequence targeting B2M
  source 1..20: mol_type = other DNA
gcccgaatgctgtcagcttc

SEQ ID NO: 963 - DNA, 20 bp, synthetic construct
  misc_feature 1..20: note = sequence targeting B2M
  source 1..20: mol_type = other DNA
aaacgcgtgcccagccaatc

SEQ ID NO: 964 - DNA, 20 bp, synthetic construct
  misc_feature 1..20: note = sequence targeting B2M
  source 1..20: mol_type = other DNA
gtgcccagccaatcaggaca

SEQ ID NO: 965 - DNA, 20 bp, synthetic construct
  misc_feature 1..20: note = sequence targeting B2M
  source 1..20: mol_type = other DNA
ccaatcaggacaaggcccgc

SEQ ID NO: 966 - DNA, 20 bp, synthetic construct
  misc_feature 1..20: note = sequence targeting B2M
  source 1..20: mol_type = other DNA
caatcaggacaaggcccgca

SEQ ID NO: 967 - DNA, 20 bp, synthetic construct
  misc_feature 1..20: note = sequence targeting B2M
  source 1..20: mol_type = other DNA
caagccagcgacgcagtgcc

SEQ ID NO: 968 - DNA, 20 bp, synthetic construct
  misc_feature 1..20: note = sequence targeting B2M
  source 1..20: mol_type = other DNA
cgcagtgccaggttagagag

SEQ ID NO: 969 - DNA, 20 bp, synthetic construct
  misc_feature 1..20: note = sequence targeting B2M
  source 1..20: mol_type = other DNA
gcagtgccaggttagagaga

SEQ ID NO: 970 - DNA, 20 bp, synthetic construct
  misc_feature 1..20: note = sequence targeting B2M
  source 1..20: mol_type = other DNA
gagtctcgtgatgtttaaga

SEQ ID NO: 971 - DNA, 20 bp, synthetic construct
  misc_feature 1..20: note = sequence targeting B2M
  source 1..20: mol_type = other DNA
taagaaggcatgcactagac

SEQ ID NO: 972 - DNA, 20 bp, synthetic construct
  misc_feature 1..20: note = sequence targeting B2M
  source 1..20: mol_type = other DNA
aagaaggcatgcactagact

SEQ ID NO: 973 - DNA, 20 bp, synthetic construct
  misc_feature 1..20: note = sequence targeting B2M
  source 1..20: mol_type = other DNA
tgagtttgctgtctgtacat

SEQ ID NO: 974 - DNA, 20 bp, synthetic construct
  misc_feature 1..20: note = sequence targeting B2M
  source 1..20: mol_type = other DNA
tacatcggcgccctccgatc

SEQ ID NO: 975 - DNA, 20 bp, synthetic construct
  misc_feature 1..20: note = sequence targeting B2M
  source 1..20: mol_type = other DNA
acatcggcgccctccgatct

SEQ ID NO: 976 - DNA, 20 bp, synthetic construct
  misc_feature 1..20: note = sequence targeting B2M
  source 1..20: mol_type = other DNA
catcggcgccctccgatctg

SEQ ID NO: 977 - DNA, 20 bp, synthetic construct
  misc_feature 1..20: note = sequence targeting B2M
  source 1..20: mol_type = other DNA
ctggggtgcgcgccccagct

SEQ ID NO: 978 - DNA, 20 bp, synthetic construct
  misc_feature 1..20: note = sequence targeting B2M
  source 1..20: mol_type = other DNA
tggggtgcgcgccccagctt

SEQ ID NO: 979 - DNA, 20 bp, synthetic construct
  misc_feature 1..20: note = sequence targeting B2M
  source 1..20: mol_type = other DNA
cgcgccccagcttgggacac

SEQ ID NO: 980 - DNA, 20 bp, synthetic construct
  misc_feature 1..20: note = sequence targeting B2M
  source 1..20: mol_type = other DNA
gcgccccagcttgggacacc

SEQ ID NO: 981 - DNA, 20 bp, synthetic construct
  misc_feature 1..20: note = sequence targeting B2M
  source 1..20: mol_type = other DNA
caagtcacttagcatctctg

SEQ ID NO: 982 - DNA, 20 bp, synthetic construct
  misc_feature 1..20: note = sequence targeting B2M
  source 1..20: mol_type = other DNA
acagaagttctccttctgct

SEQ ID NO: 983 - DNA, 20 bp, synthetic construct
  misc_feature 1..20: note = sequence targeting B2M
  source 1..20: mol_type = other DNA
attcaaagatcttaatcttc

SEQ ID NO: 984 - DNA, 20 bp, synthetic construct
  misc_feature 1..20: note = sequence targeting B2M
  source 1..20: mol_type = other DNA
ttcaaagatcttaatcttct

SEQ ID NO: 985 - DNA, 20 bp, synthetic construct
  misc_feature 1..20: note = sequence targeting B2M
  source 1..20: mol_type = other DNA
ttttctcgaatgaaaaatgc

SEQ ID NO: 986 - DNA, 20 bp, synthetic construct
  misc_feature 1..20: note = sequence targeting B2M
  source 1..20: mol_type = other DNA
tgcaggtccgagcagttaac

SEQ ID NO: 987 - DNA, 20 bp, synthetic construct
  misc_feature 1..20: note = sequence targeting B2M
  source 1..20: mol_type = other DNA
ggtccgagcagttaactggc

SEQ ID NO: 988 - DNA, 20 bp, synthetic construct
  misc_feature 1..20: note = sequence targeting B2M
  source 1..20: mol_type = other DNA
gtccgagcagttaactggct

SEQ ID NO: 989 - DNA, 20 bp, synthetic construct
  misc_feature 1..20: note = sequence targeting B2M
  source 1..20: mol_type = other DNA
tccgagcagttaactggctg

SEQ ID NO: 990 - DNA, 20 bp, synthetic construct
  misc_feature 1..20: note = sequence targeting B2M
  source 1..20: mol_type = other DNA
agcaagtcacttagcatctc

SEQ ID NO: 991 - DNA, 20 bp, synthetic construct
  misc_feature 1..20: note = sequence targeting B2M
  source 1..20: mol_type = other DNA
gcaagtcacttagcatctct

SEQ ID NO: 992 - DNA, 20 bp, synthetic construct
  misc_feature 1..20: note = sequence targeting B2M
  source 1..20: mol_type = other DNA
tggggccagtctgcaaagcg

SEQ ID NO: 993 - DNA, 20 bp, synthetic construct
  misc_feature 1..20: note = sequence targeting B2M
  source 1..20: mol_type = other DNA
ggggccagtctgcaaagcga

SEQ ID NO: 994 - DNA, 20 bp, synthetic construct
  misc_feature 1..20: note = sequence targeting B2M
  source 1..20: mol_type = other DNA
gggccagtctgcaaagcgag

SEQ ID NO: 995 - DNA, 20 bp, synthetic construct
  misc_feature 1..20: note = sequence targeting B2M
  source 1..20: mol_type = other DNA
ggccagtctgcaaagcgagg

SEQ ID NO: 996 - DNA, 20 bp, synthetic construct
  misc_feature 1..20: note = sequence targeting B2M
  source 1..20: mol_type = other DNA
ggacaccgggcgctcattct

SEQ ID NO: 997 - DNA, 20 bp, synthetic construct
  misc_feature 1..20: note = sequence targeting B2M
  source 1..20: mol_type = other DNA
ggcgctcattctaggacttc

SEQ ID NO: 998 - DNA, 20 bp, synthetic construct
  misc_feature 1..20: note = sequence targeting B2M
  source 1..20: mol_type = other DNA
ctcattctaggacttcaggc

SEQ ID NO: 999 - DNA, 20 bp, synthetic construct
  misc_feature 1..20: note = sequence targeting B2M
  source 1..20: mol_type = other DNA
attctaggacttcaggctgg

SEQ ID NO: 1000 - DNA, 20 bp, synthetic construct
  misc_feature 1..20: note = sequence targeting B2M
  source 1..20: mol_type = other DNA
ttcaggctggaggcacatta

SEQ ID NO: 1001 - DNA, 20 bp, synthetic construct
  misc_feature 1..20: note = sequence targeting B2M
  source 1..20: mol_type = other DNA
tgccccctcgctttgcagac

SEQ ID NO: 1002 - DNA, 20 bp, synthetic construct
  misc_feature 1..20: note = sequence targeting B2M
  source 1..20: mol_type = other DNA
gatgctaagtgacttgctaa

SEQ ID NO: 1003 - DNA, 20 bp, synthetic construct
  misc_feature 1..20: note = sequence targeting B2M
  source 1..20: mol_type = other DNA
gccccagccagttaactgct

SEQ ID NO: 1004 - DNA, 20 bp, synthetic construct
  misc_feature 1..20: note = sequence targeting B2M
  source 1..20: mol_type = other DNA
gcatttttcattcgagaaaa

SEQ ID NO: 1005 - DNA, 20 bp, synthetic construct
  misc_feature 1..20: note = sequence targeting B2M
  source 1..20: mol_type = other DNA
tttgaatgctacctagcaga

SEQ ID NO: 1006 - DNA, 20 bp, synthetic construct
  misc_feature 1..20: note = sequence targeting B2M
  source 1..20: mol_type = other DNA
ttctgtttataactacagct

SEQ ID NO: 1007 - DNA, 20 bp, synthetic construct
  misc_feature 1..20: note = sequence targeting B2M
  source 1..20: mol_type = other DNA
tctgtttataactacagctt

SEQ ID NO: 1008 - DNA, 21 bp, synthetic construct
  misc_feature 1..21: note = target B2M sequence complement
  source 1..21: mol_type = other DNA
agagaatggaaagtcaaattt

SEQ ID NO: 1009 - DNA, 21 bp, synthetic construct
  misc_feature 1..21: note = target B2M sequence complement
  source 1..21: mol_type = other DNA
atggacatgatcttctttata

SEQ ID NO: 1010 - DNA, 21 bp, synthetic construct
  misc_feature 1..21: note = target B2M sequence complement
  source 1..21: mol_type = other DNA
tggacatgatcttctttataa

SEQ ID NO: 1011 - DNA, 21 bp, synthetic construct
  misc_feature 1..21: note = target B2M sequence complement
  source 1..21: mol_type = other DNA
ggacatgatcttctttataat

SEQ ID NO: 1012 - DNA, 21 bp, synthetic construct
  misc_feature 1..21: note = target B2M sequence complement
  source 1..21: mol_type = other DNA
tgacaggattattggaaattt

SEQ ID NO: 1013 - DNA, 21 bp, synthetic construct
  misc_feature 1..21: note = target B2M sequence complement
  source 1..21: mol_type = other DNA
ttgtggttaatctggtttatt

SEQ ID NO: 1014 - DNA, 21 bp, synthetic construct
  misc_feature 1..21: note = target B2M sequence complement
  source 1..21: mol_type = other DNA
tgtggttaatctggtttattt

SEQ ID NO: 1015 - DNA, 21 bp, synthetic construct
  misc_feature 1..21: note = target B2M sequence complement
  source 1..21: mol_type = other DNA
gcagagaatggaaagtcaaat

SEQ ID NO: 1016 - DNA, 21 bp, synthetic construct
  misc_feature 1..21: note = target B2M sequence complement
  source 1..21: mol_type = other DNA
cagagaatggaaagtcaaatt

SEQ ID NO: 1017 - DNA, 21 bp, synthetic construct
  misc_feature 1..21: note = target B2M sequence complement
  source 1..21: mol_type = other DNA
gagaatggaaagtcaaatttc

SEQ ID NO: 1018 - DNA, 21 bp, synthetic construct
  misc_feature 1..21: note = target B2M sequence complement
  source 1..21: mol_type = other DNA
gtcacagcccaagatagttaa

SEQ ID NO: 1019 - DNA, 21 bp, synthetic construct
  misc_feature 1..21: note = target B2M sequence complement
  source 1..21: mol_type = other DNA
tgcttatacacttacacttta

SEQ ID NO: 1020 - DNA, 21 bp, synthetic construct
  misc_feature 1..21: note = target B2M sequence complement
  source 1..21: mol_type = other DNA
gcttatacacttacactttat

SEQ ID NO: 1021 - DNA, 21 bp, synthetic construct
  misc_feature 1..21: note = target B2M sequence complement
  source 1..21: mol_type = other DNA
cttatacacttacactttatg

SEQ ID NO: 1022 - DNA, 21 bp, synthetic construct
  misc_feature 1..21: note = target B2M sequence complement
  source 1..21: mol_type = other DNA
acatggacatgatcttcttta

SEQ ID NO: 1023 - DNA, 21 bp, synthetic construct
  misc_feature 1..21: note = target B2M sequence complement
  source 1..21: mol_type = other DNA
catggacatgatcttctttat

SEQ ID NO: 1024 - DNA, 21 bp, synthetic construct
  misc_feature 1..21: note = target B2M sequence complement
  source 1..21: mol_type = other DNA
atcaacatcttggtcagattt

SEQ ID NO: 1025 - DNA, 21 bp, synthetic construct
  misc_feature 1..21: note = target B2M sequence complement
  source 1..21: mol_type = other DNA
cttgcactcaaagcttgttaa

SEQ ID NO: 1026 - DNA, 21 bp, synthetic construct
  misc_feature 1..21: note = target B2M sequence complement
  source 1..21: mol_type = other DNA
agttaagcgtgcataagttaa

SEQ ID NO: 1027 - DNA, 21 bp, synthetic construct
  misc_feature 1..21: note = target B2M sequence complement
  source 1..21: mol_type = other DNA
gcataagttaacttccaattt

SEQ ID NO: 1028 - DNA, 21 bp, synthetic construct
  misc_feature 1..21: note = target B2M sequence complement
  source 1..21: mol_type = other DNA
tacatactctgcttagaattt

SEQ ID NO: 1029 - DNA, 21 bp, synthetic construct
  misc_feature 1..21: note = target B2M sequence complement
  source 1..21: mol_type = other DNA
acatactctgcttagaatttg

SEQ ID NO: 1030 - DNA, 21 bp, synthetic construct
  misc_feature 1..21: note = target B2M sequence complement
  source 1..21: mol_type = other DNA
ttgacaggattattggaaatt

SEQ ID NO: 1031 - DNA, 21 bp, synthetic construct
  misc_feature 1..21: note = target B2M sequence complement
  source 1..21: mol_type = other DNA
gacaggattattggaaatttg

SEQ ID NO: 1032 - DNA, 21 bp, synthetic construct
  misc_feature 1..21: note = target B2M sequence complement
  source 1..21: mol_type = other DNA
taaggcatggttgtggttaat

SEQ ID NO: 1033 - DNA, 21 bp, synthetic construct
  misc_feature 1..21: note = target B2M sequence complement
  source 1..21: mol_type = other DNA
gttgtggttaatctggtttat

SEQ ID NO: 1034 - DNA, 21 bp, synthetic construct
  misc_feature 1..21: note = target B2M sequence complement
  source 1..21: mol_type = other DNA
gttccacaagttaaataaatc

SEQ ID NO: 1035 - DNA, 21 bp, synthetic construct
  misc_feature 1..21: note = target B2M sequence complement
  source 1..21: mol_type = other DNA
tccagcgtactccaaagattc

SEQ ID NO: 1036 - DNA, 21 bp, synthetic construct
  misc_feature 1..21: note = target B2M sequence complement
  source 1..21: mol_type = other DNA
tactccaaagattcaggttta

SEQ ID NO: 1037 - DNA, 21 bp, synthetic construct
  misc_feature 1..21: note = target B2M sequence complement
  source 1..21: mol_type = other DNA
actccaaagattcaggtttac

SEQ ID NO: 1038 - DNA, 21 bp, synthetic construct
  misc_feature 1..21: note = target B2M sequence complement
  source 1..21: mol_type = other DNA
cacgtcatccagcagagaatg

SEQ ID NO: 1039 - DNA, 21 bp, synthetic construct
  misc_feature 1..21: note = target B2M sequence complement
  source 1..21: mol_type = other DNA
ggtttcatccatccgacattg

SEQ ID NO: 1040 - DNA, 21 bp, synthetic construct
  misc_feature 1..21: note = target B2M sequence complement
  source 1..21: mol_type = other DNA
ccgacattgaagttgacttac

SEQ ID NO: 1041 - DNA, 21 bp, synthetic construct
  misc_feature 1..21: note = target B2M sequence complement
  source 1..21: mol_type = other DNA
tgaagaatggagagagaattg

SEQ ID NO: 1042 - DNA, 21 bp, synthetic construct
  misc_feature 1..21: note = target B2M sequence complement
  source 1..21: mol_type = other DNA
gagcattcagacttgtctttc

SEQ ID NO: 1043 - DNA, 21 bp, synthetic construct
  misc_feature 1..21: note = target B2M sequence complement
  source 1..21: mol_type = other DNA
ttcagcaaggactggtctttc

SEQ ID NO: 1044 - DNA, 21 bp, synthetic construct
  misc_feature 1..21: note = target B2M sequence complement
  source 1..21: mol_type = other DNA
gcaaggactggtctttctatc

SEQ ID NO: 1045 - DNA, 21 bp, synthetic construct
  misc_feature 1..21: note = target B2M sequence complement
  source 1..21: mol_type = other DNA
cgtgtgaaccatgtgactttg

SEQ ID NO: 1046 - DNA, 21 bp, synthetic construct
  misc_feature 1..21: note = target B2M sequence complement
  source 1..21: mol_type = other DNA
ctttgtcacagcccaagatag

SEQ ID NO: 1047 - DNA, 21 bp, synthetic construct
  misc_feature 1..21: note = target B2M sequence complement
  source 1..21: mol_type = other DNA
tcacagcccaagatagttaag

SEQ ID NO: 1048 - DNA, 21 bp, synthetic construct
  misc_feature 1..21: note = target B2M sequence complement
  source 1..21: mol_type = other DNA
agtgggatcgagacatgtaag

SEQ ID NO: 1049 - DNA, 21 bp, synthetic construct
  misc_feature 1..21: note = target B2M sequence complement
  source 1..21: mol_type = other DNA
aggtttgaagatgccgcattt

SEQ ID NO: 1050 - DNA, 21 bp, synthetic construct
  misc_feature 1..21: note = target B2M sequence complement
  source 1..21: mol_type = other DNA
ggtttgaagatgccgcatttg

SEQ ID NO: 1051 - DNA, 21 bp, synthetic construct
  misc_feature 1..21: note = target B2M sequence complement
  source 1..21: mol_type = other DNA
ttgatatgcttatacacttac

SEQ ID NO: 1052 - DNA, 21 bp, synthetic construct
  misc_feature 1..21: note = target B2M sequence complement
  source 1..21: mol_type = other DNA
tgagtgctgtctccatgtttg

SEQ ID NO: 1053 - DNA, 21 bp, synthetic construct
  misc_feature 1..21: note = target B2M sequence complement
  source 1..21: mol_type = other DNA
tgtctccatgtttgatgtatc

SEQ ID NO: 1054 - DNA, 21 bp, synthetic construct
  misc_feature 1..21: note = target B2M sequence complement
  source 1..21: mol_type = other DNA
tcaacatcttggtcagatttg

SEQ ID NO: 1055 - DNA, 21 bp, synthetic construct
  misc_feature 1..21: note = target B2M sequence complement
  source 1..21: mol_type = other DNA
tcagatttgaactcttcaatc

SEQ ID NO: 1056 - DNA, 21 bp, synthetic construct
  misc_feature 1..21: note = target B2M sequence complement
  source 1..21: mol_type = other DNA
ttcaatctcttgcactcaaag

SEQ ID NO: 1057 - DNA, 21 bp, synthetic construct
  misc_feature 1..21: note = target B2M sequence complement
  source 1..21: mol_type = other DNA
ttgcactcaaagcttgttaag

SEQ ID NO: 1058 - DNA, 21 bp, synthetic construct
  misc_feature 1..21: note = target B2M sequence complement
  source 1..21: mol_type = other DNA
actcaaagcttgttaagatag

SEQ ID NO: 1059 - DNA, 21 bp, synthetic construct
  misc_feature 1..21: note = target B2M sequence complement
  source 1..21: mol_type = other DNA
agatagttaagcgtgcataag

SEQ ID NO: 1060 - DNA, 21 bp, synthetic construct
  misc_feature 1..21: note = target B2M sequence complement
  source 1..21: mol_type = other DNA
tgcataagttaacttccaatt

SEQ ID NO: 1061 - DNA, 21 bp, synthetic construct
  misc_feature 1..21: note = target B2M sequence complement
  source 1..21: mol_type = other DNA
gttaacttccaatttacatac

SEQ ID NO: 1062 - DNA, 21 bp, synthetic construct
  misc_feature 1..21: note = target B2M sequence complement
  source 1..21: mol_type = other DNA
attgacaggattattggaaat

SEQ ID NO: 1063 - DNA, 21 bp, synthetic construct
  misc_feature 1..21: note = target B2M sequence complement
  source 1..21: mol_type = other DNA
gtaaggcatggttgtggttaa

SEQ ID NO: 1064 - DNA, 21 bp, synthetic construct
  misc_feature 1..21: note = target B2M sequence complement
  source 1..21: mol_type = other DNA
ggttgtggttaatctggttta

SEQ ID NO: 1065 - DNA, 21 bp, synthetic construct
  misc_feature 1..21: note = target B2M sequence complement
  source 1..21: mol_type = other DNA
ttcctgaagctgacagcattc

SEQ ID NO: 1066 - DNA, 21 bp, synthetic construct
  misc_feature 1..21: note = target B2M sequence complement
  source 1..21: mol_type = other DNA
gctatccagcgtactccaaag

SEQ ID NO: 1067 - DNA, 21 bp, synthetic construct
  misc_feature 1..21: note = target B2M sequence complement
  source 1..21: mol_type = other DNA
catccagcagagaatggaaag

SEQ ID NO: 1068 - DNA, 21 bp, synthetic construct
  misc_feature 1..21: note = target B2M sequence complement
  source 1..21: mol_type = other DNA
caaatttcctgaattgctatg

SEQ ID NO: 1069 - DNA, 21 bp, synthetic construct
  misc_feature 1..21: note = target B2M sequence complement
  source 1..21: mol_type = other DNA
attgctatgtgtctgggtttc

SEQ ID NO: 1070 - DNA, 21 bp, synthetic construct
  misc_feature 1..21: note = target B2M sequence complement
  source 1..21: mol_type = other DNA
gaagatgccgcatttggattg

SEQ ID NO: 1071 - DNA, 21 bp, synthetic construct
  misc_feature 1..21: note = target B2M sequence complement
  source 1..21: mol_type = other DNA
caatttacatactctgcttag

SEQ ID NO: 1072 - DNA, 21 bp, synthetic construct
  misc_feature 1..21: note = target B2M sequence complement
  source 1..21: mol_type = other DNA
tatccagcgtactccaaagat

SEQ ID NO: 1073 - DNA, 21 bp, synthetic construct
  misc_feature 1..21: note = target B2M sequence complement
  source 1..21: mol_type = other DNA
atccagcgtactccaaagatt

SEQ ID NO: 1074 - DNA, 21 bp, synthetic construct
  misc_feature 1..21: note = target B2M sequence complement
  source 1..21: mol_type = other DNA
ctccaaagattcaggtttact

SEQ ID NO: 1075 - DNA, 21 bp, synthetic construct
  misc_feature 1..21: note = target B2M sequence complement
  source 1..21: mol_type = other DNA
tgctatgtgtctgggtttcat

SEQ ID NO: 1076 - DNA, 21 bp, synthetic construct
  misc_feature 1..21: note = target B2M sequence complement
  source 1..21: mol_type = other DNA
tttcatccatccgacattgaa

SEQ ID NO: 1077 - DNA, 21 bp, synthetic construct
  misc_feature 1..21: note = target B2M sequence complement
  source 1..21: mol_type = other DNA
gaagttgacttactgaagaat

SEQ ID NO: 1078 - DNA, 21 bp, synthetic construct
  misc_feature 1..21: note = target B2M sequence complement
  source 1..21: mol_type = other DNA
gaagaatggagagagaattga

SEQ ID NO: 1079 - DNA, 21 bp, synthetic construct
  misc_feature 1..21: note = target B2M sequence complement
  source 1..21: mol_type = other DNA
agaatggagagagaattgaaa

SEQ ID NO: 1080 - DNA, 21 bp, synthetic construct
  misc_feature 1..21: note = target B2M sequence complement
  source 1..21: mol_type = other DNA
cagcaaggactggtctttcta

SEQ ID NO: 1081 - DNA, 21 bp, synthetic construct
  misc_feature 1..21: note = target B2M sequence complement
  source 1..21: mol_type = other DNA
agcaaggactggtctttctat

SEQ ID NO: 1082 - DNA, 21 bp, synthetic construct
  misc_feature 1..21: note = target B2M sequence complement
  source 1..21: mol_type = other DNA
actttgtcacagcccaagata

SEQ ID NO: 1083 - DNA, 21 bp, synthetic construct
  misc_feature 1..21: note = target B2M sequence complement
  source 1..21: mol_type = other DNA
ttgtcacagcccaagatagtt

SEQ ID NO: 1084 - DNA, 21 bp, synthetic construct
  misc_feature 1..21: note = target B2M sequence complement
  source 1..21: mol_type = other DNA
tgtcacagcccaagatagtta

SEQ ID NO: 1085 - DNA, 21 bp, synthetic construct
  misc_feature 1..21: note = target B2M sequence complement
  source 1..21: mol_type = other DNA
cacagcccaagatagttaagt

SEQ ID NO: 1086 - DNA, 21 bp, synthetic construct
  misc_feature 1..21: note = target B2M sequence complement
  source 1..21: mol_type = other DNA
gcagcatcatggaggtttgaa

SEQ ID NO: 1087 - DNA, 21 bp, synthetic construct
  misc_feature 1..21: note = target B2M sequence complement
  source 1..21: mol_type = other DNA
ccgcatttggattggatgaat

SEQ ID NO: 1088 - DNA, 21 bp, synthetic construct
  misc_feature 1..21: note = target B2M sequence complement
  source 1..21: mol_type = other DNA
ttgagtgctgtctccatgttt

SEQ ID NO: 1089 - DNA, 21 bp, synthetic construct
  misc_feature 1..21: note = target B2M sequence complement
  source 1..21: mol_type = other DNA
agtgctgtctccatgtttgat

SEQ ID NO: 1090 - DNA, 21 bp, synthetic construct
  misc_feature 1..21: note = target B2M sequence complement
  source 1..21: mol_type = other DNA
ctgtctccatgtttgatgtat

SEQ ID NO: 1091 - DNA, 21 bp, synthetic construct
  misc_feature 1..21: note = target B2M sequence complement
  source 1..21: mol_type = other DNA
tctaggagggctggcaactta

SEQ ID NO: 1092 - DNA, 21 bp, synthetic construct
  misc_feature 1..21: note = target B2M sequence complement
  source 1..21: mol_type = other DNA
caacatcttggtcagatttga

SEQ ID NO: 1093 - DNA, 21 bp, synthetic construct
  misc_feature 1..21: note = target B2M sequence complement
  source 1..21: mol_type = other DNA
gtcagatttgaactcttcaat

SEQ ID NO: 1094 - DNA, 21 bp, synthetic construct
  misc_feature 1..21: note = target B2M sequence complement
  source 1..21: mol_type = other DNA
tcttgcactcaaagcttgtta

SEQ ID NO: 1095 - DNA, 21 bp, synthetic construct
  misc_feature 1..21: note = target B2M sequence complement
  source 1..21: mol_type = other DNA
tgcactcaaagcttgttaaga

SEQ ID NO: 1096 - DNA, 21 bp, synthetic construct
  misc_feature 1..21: note = target B2M sequence complement
  source 1..21: mol_type = other DNA
gcactcaaagcttgttaagat

SEQ ID NO: 1097 - DNA, 21 bp, synthetic construct
  misc_feature 1..21: note = target B2M sequence complement
  source 1..21: mol_type = other DNA
cactcaaagcttgttaagata

SEQ ID NO: 1098 - DNA, 21 bp, synthetic construct
  misc_feature 1..21: note = target B2M sequence complement
  source 1..21: mol_type = other DNA
tcaaagcttgttaagatagtt

SEQ ID NO: 1099 - DNA, 21 bp, synthetic construct
  misc_feature 1..21: note = target B2M sequence complement
  source 1..21: mol_type = other DNA
caaagcttgttaagatagtta

SEQ ID NO: 1100 - DNA, 21 bp, synthetic construct
  misc_feature 1..21: note = target B2M sequence complement
  source 1..21: mol_type = other DNA
gatagttaagcgtgcataagt

SEQ ID NO: 1101 - DNA, 21 bp, synthetic construct
  misc_feature 1..21: note = target B2M sequence complement
  source 1..21: mol_type = other DNA
atagttaagcgtgcataagtt

SEQ ID NO: 1102 - DNA, 21 bp, synthetic construct
  misc_feature 1..21: note = target B2M sequence complement
  source 1..21: mol_type = other DNA
tagttaagcgtgcataagtta

SEQ ID NO: 1103 - DNA, 21 bp, synthetic construct
  misc_feature 1..21: note = target B2M sequence complement
  source 1..21: mol_type = other DNA
ttaagcgtgcataagttaact

SEQ ID NO: 1104 - DNA, 21 bp, synthetic construct
  misc_feature 1..21: note = target B2M sequence complement
  source 1..21: mol_type = other DNA
taagcgtgcataagttaactt

SEQ ID NO: 1105 - DNA, 21 bp, synthetic construct
  misc_feature 1..21: note = target B2M sequence complement
  source 1..21: mol_type = other DNA
atttacatactctgcttagaa

SEQ ID NO: 1106 - DNA, 21 bp, synthetic construct
  misc_feature 1..21: note = target B2M sequence complement
  source 1..21: mol_type = other DNA
tttacatactctgcttagaat

SEQ ID NO: 1107 - DNA, 21 bp, synthetic construct
  misc_feature 1..21: note = target B2M sequence complement
  source 1..21: mol_type = other DNA
acaggattattggaaatttgt

SEQ ID NO: 1108 - DNA, 21 bp, synthetic construct
  misc_feature 1..21: note = target B2M sequence complement
  source 1..21: mol_type = other DNA
caggattattggaaatttgtt

SEQ ID NO: 1109 - DNA, 21 bp, synthetic construct
  misc_feature 1..21: note = target B2M sequence complement
  source 1..21: mol_type = other DNA
aggcatggttgtggttaatct

SEQ ID NO: 1110 - DNA, 21 bp, synthetic construct
  misc_feature 1..21: note = target B2M sequence complement
  source 1..21: mol_type = other DNA
cagcagagaatggaaagtcaa

SEQ ID NO: 1111 - DNA, 21 bp, synthetic construct
  misc_feature 1..21: note = target B2M sequence complement
  source 1..21: mol_type = other DNA
tccgacattgaagttgactta

SEQ ID NO: 1112 - DNA, 21 bp, synthetic construct
  misc_feature 1..21: note = target B2M sequence complement
  source 1..21: mol_type = other DNA
ctggtctttctatctcttgta

SEQ ID NO: 1113 - DNA, 21 bp, synthetic construct
  misc_feature 1..21: note = target B2M sequence complement
  source 1..21: mol_type = other DNA
ccgtgtgaaccatgtgacttt

SEQ ID NO: 1114 - DNA, 21 bp, synthetic construct
  misc_feature 1..21: note = target B2M sequence complement
  source 1..21: mol_type = other DNA
cccaagatagttaagtgggat

SEQ ID NO: 1115 - DNA, 21 bp, synthetic construct
  misc_feature 1..21: note = target B2M sequence complement
  source 1..21: mol_type = other DNA
ggttgctccacaggtagctct

SEQ ID NO: 1116 - DNA, 21 bp, synthetic construct
  misc_feature 1..21: note = target B2M sequence complement
  source 1..21: mol_type = other DNA
gctccacaggtagctctagga

SEQ ID NO: 1117 - DNA, 21 bp, synthetic construct
  misc_feature 1..21: note = target B2M sequence complement
  source 1..21: mol_type = other DNA
gggagcagagaattctcttat

SEQ ID NO: 1118 - DNA, 21 bp, synthetic construct
  misc_feature 1..21: note = target B2M sequence complement
  source 1..21: mol_type = other DNA
ggagcagagaattctcttatc

SEQ ID NO: 1119 - DNA, 21 bp, synthetic construct
  misc_feature 1..21: note = target B2M sequence complement
  source 1..21: mol_type = other DNA
gagcagagaattctcttatcc

SEQ ID NO: 1120 - DNA, 21 bp, synthetic construct
  misc_feature 1..21: note = target B2M sequence complement
  source 1..21: mol_type = other DNA
gagaattctcttatccaacat

SEQ ID NO: 1121 - DNA, 21 bp, synthetic construct
  misc_feature 1..21: note = target B2M sequence complement
  source 1..21: mol_type = other DNA
gaattctcttatccaacatca

SEQ ID NO: 1122 - DNA, 21 bp, synthetic construct
  misc_feature 1..21: note = target B2M sequence complement
  source 1..21: mol_type = other DNA
aagtggagcattcagacttgt

SEQ ID NO: 1123 - DNA, 21 bp, synthetic construct
  misc_feature 1..21: note = target B2M sequence complement
  source 1..21: mol_type = other DNA
aaggactggtctttctatctc

SEQ ID NO: 1124 - DNA, 21 bp, synthetic construct
  misc_feature 1..21: note = target B2M sequence complement
  source 1..21: mol_type = other DNA
aagcttgttaagatagttaag

SEQ ID NO: 1125 - DNA, 21 bp, synthetic construct
  misc_feature 1..21: note = target B2M sequence complement
  source 1..21: mol_type = other DNA
aagcgtgcataagttaacttc

SEQ ID NO: 1126 - DNA, 21 bp, synthetic construct
  misc_feature 1..21: note = target B2M sequence complement
  source 1..21: mol_type = other DNA
aagatgccgcatttggattgg

SEQ ID NO: 1127 - DNA, 21 bp, synthetic construct
  misc_feature 1..21: note = target B2M sequence complement
  source 1..21: mol_type = other DNA
aagaatggagagagaattgaa

SEQ ID NO: 1128 - DNA, 21 bp, synthetic construct
  misc_feature 1..21: note = target B2M sequence complement
  source 1..21: mol_type = other DNA
aacatcaacatcttggtcaga

SEQ ID NO: 1129 - DNA, 21 bp, synthetic construct
  misc_feature 1..21: note = target B2M sequence complement
  source 1..21: mol_type = other DNA
aaggcatggttgtggttaatc

SEQ ID NO: 1130 - DNA, 21 bp, synthetic construct
  misc_feature 1..21: note = target B2M sequence complement
  source 1..21: mol_type = other DNA
aagcagcatcatggaggtttg

SEQ ID NO: 1131 - DNA, 21 bp, synthetic construct
  misc_feature 1..21: note = target B2M sequence complement
  source 1..21: mol_type = other DNA
aagatgagtatgcctgccgtg

SEQ ID NO: 1132 - DNA, 21 bp, synthetic construct
  misc_feature 1..21: note = target B2M sequence complement
  source 1..21: mol_type = other DNA
aagttgacttactgaagaatg

SEQ ID NO: 1133 - DNA, 21 bp, synthetic construct
  misc_feature 1..21: note = target B2M sequence complement
  source 1..21: mol_type = other DNA
aagatagttaagcgtgcataa

SEQ ID NO: 1134 - DNA, 21 bp, synthetic construct
  misc_feature 1..21: note = target B2M sequence complement
  source 1..21: mol_type = other DNA
aacttccaatttacatactct

SEQ ID NO: 1135 - DNA, 21 bp, synthetic construct
  misc_feature 1..21: note = target B2M sequence complement
  source 1..21: mol_type = other DNA
aacatcttggtcagatttgaa

SEQ ID NO: 1136 - DNA, 21 bp, synthetic construct
  misc_feature 1..21: note = target B2M sequence complement
  source 1..21: mol_type = other DNA
aactcttcaatctcttgcact

SEQ ID NO: 1137 - DNA, 21 bp, synthetic construct
  misc_feature 1..21: note = target B2M sequence complement
  source 1..21: mol_type = other DNA
aatttcctgaattgctatgtg

SEQ ID NO: 1138 - DNA, 21 bp, synthetic construct
  misc_feature 1..21: note = target B2M sequence complement
  source 1..21: mol_type = other DNA
aatggaaagtcaaatttcctg

SEQ ID NO: 1139 - DNA, 21 bp, synthetic construct
  misc_feature 1..21: note = target B2M sequence complement
  source 1..21: mol_type = other DNA
aaccatgtgactttgtcacag

SEQ ID NO: 1140 - DNA, 21 bp, synthetic construct
  misc_feature 1..21: note = target B2M sequence complement
  source 1..21: mol_type = other DNA
aattgacaggattattggaaa

SEQ ID NO: 1141 - DNA, 21 bp, synthetic construct
  misc_feature 1..21: note = target B2M sequence complement
  source 1..21: mol_type = other DNA
aattctcttatccaacatcaa

SEQ ID NO: 1142 - DNA, 21 bp, synthetic construct
  misc_feature 1..21: note = target B2M sequence complement
  source 1..21: mol_type = other DNA
aaagtggagcattcagacttg

SEQ ID NO: 1143 - DNA, 21 bp, synthetic construct
  misc_feature 1..21: note = target B2M sequence complement
  source 1..21: mol_type = other DNA
aaagtcaaatttcctgaattg

SEQ ID NO: 1144 - DNA, 21 bp, synthetic construct
  misc_feature 1..21: note = target B2M sequence complement
  source 1..21: mol_type = other DNA
gttgctccacaggtagctcta

SEQ ID NO: 1145 - DNA, 21 bp, synthetic construct
  misc_feature 1..21: note = target B2M sequence complement
  source 1..21: mol_type = other DNA
aatttacatactctgcttaga

SEQ ID NO: 1146 - DNA, 21 bp, synthetic construct
  misc_feature 1..21: note = target HLA sequence complement
  source 1..21: mol_type = other DNA
cttcttccttccctattaaaa

SEQ ID NO: 1147 - DNA, 21 bp, synthetic construct
  misc_feature 1..21: note = target HLA sequence complement
  source 1..21: mol_type = other DNA
tctcactccatgaggtatttc

SEQ ID NO: 1148 - DNA, 21 bp, synthetic construct
  misc_feature 1..21: note = target HLA sequence complement
  source 1..21: mol_type = other DNA
ctctcactccatgaggtattt

SEQ ID NO: 1149 - DNA, 21 bp, synthetic construct
  misc_feature 1..21: note = target HLA sequence complement
  source 1..21: mol_type = other DNA
gaggaggaagagctcagatag

SEQ ID NO: 1150 - DNA, 21 bp, synthetic construct
  misc_feature 1..21: note = target HLA sequence complement
  source 1..21: mol_type = other DNA
gctctcactccatgaggtatt

SEQ ID NO: 1151 - DNA, 21 bp, synthetic construct
  misc_feature 1..21: note = target HLA sequence complement
  source 1..21: mol_type = other DNA
aggattacatcgccctgaaag

SEQ ID NO: 1152 - DNA, 21 bp, synthetic construct
  misc_feature 1..21: note = target HLA sequence complement
  source 1..21: mol_type = other DNA
acaccgtccagaggatgtatg

SEQ ID NO: 1153 - DNA, 21 bp, synthetic construct
  misc_feature 1..21: note = target HLA sequence complement
  source 1..21: mol_type = other DNA
agggtccttcttcctggatac

SEQ ID NO: 1154 - DNA, 21 bp, synthetic construct
  misc_feature 1..21: note = target HLA sequence complement
  source 1..21: mol_type = other DNA
cctacgacggcaaggattaca

SEQ ID NO: 1155 - DNA, 21 bp, synthetic construct
  misc_feature 1..21: note = target HLA sequence complement
  source 1..21: mol_type = other DNA
tcactccatgaggtatttctt

SEQ ID NO: 1156 - DNA, 21 bp, synthetic construct
  misc_feature 1..21: note = target HLA sequence complement
  source 1..21: mol_type = other DNA
ctacgacggcaaggattacat

SEQ ID NO: 1157 - DNA, 21 bp, synthetic construct
  misc_feature 1..21: note = target HLA sequence complement
  source 1..21: mol_type = other DNA
ctcactccatgaggtatttct

SEQ ID NO: 1158 - DNA, 21 bp, synthetic construct
  misc_feature 1..21: note = target HLA sequence complement
  source 1..21: mol_type = other DNA
ggaggaagagctcagatagaa

SEQ ID NO: 1159 - DNA, 21 bp, synthetic construct
  misc_feature 1..21: note = target HLA sequence complement
  source 1..21: mol_type = other DNA
cacaccgtccagaggatgtat

SEQ ID NO: 1160 - DNA, 21 bp, synthetic construct
  misc_feature 1..21: note = target HLA sequence complement
  source 1..21: mol_type = other DNA
cacgctgtctctgaccatgaa

SEQ ID NO: 1161 - DNA, 21 bp, synthetic construct
  misc_feature 1..21: note = target HLA sequence complement
  source 1..21: mol_type = other DNA
ctggacaggagcagagataca

SEQ ID NO: 1162 - DNA, 21 bp, synthetic construct
  misc_feature 1..21: note = target HLA sequence complement
  source 1..21: mol_type = other DNA
tggaggaggaagagctcagat

SEQ ID NO: 1163 - DNA, 21 bp, synthetic construct
  misc_feature 1..21: note = target HLA sequence complement
  source 1..21: mol_type = other DNA
ggctctcactccatgaggtat

SEQ ID NO: 1164 - DNA, 21 bp, synthetic construct
  misc_feature 1..21: note = target HLA sequence complement
  source 1..21: mol_type = other DNA
catctctgtctcaacttcatg

SEQ ID NO: 1165 - DNA, 21 bp, synthetic construct
  misc_feature 1..21: note = target HLA sequence complement
  source 1..21: mol_type = other DNA
tacgacggcaaggattacatc

SEQ ID NO: 1166 - DNA, 21 bp, synthetic construct
  misc_feature 1..21: note = target HLA sequence complement
  source 1..21: mol_type = other DNA
ggattacatcgccctgaaaga

SEQ ID NO: 1167 - DNA, 21 bp, synthetic construct
  misc_feature 1..21: note = target HLA sequence complement
  source 1..21: mol_type = other DNA
gattacatcgccctgaaagag

SEQ ID NO: 1168 - DNA, 21 bp, synthetic construct
  misc_feature 1..21: note = target HLA sequence complement
  source 1..21: mol_type = other DNA
ctcagaccaccaagcacaagt

SEQ ID NO: 1169 - DNA, 21 bp, synthetic construct
  misc_feature 1..21: note = target HLA sequence complement
  source 1..21: mol_type = other DNA
tcacaccgtccagaggatgta

SEQ ID NO: 1170 - DNA, 21 bp, synthetic construct
  misc_feature 1..21: note = target HLA sequence complement
  source 1..21: mol_type = other DNA
actccatgaggtatttcttca

SEQ ID NO: 1171 - DNA, 21 bp, synthetic construct
  misc_feature 1..21: note = target HLA sequence complement
  source 1..21: mol_type = other DNA
cactccatgaggtatttcttc

SEQ ID NO: 1172 - DNA, 21 bp, synthetic construct
  misc_feature 1..21: note = target HLA sequence complement
  source 1..21: mol_type = other DNA
ccatgaggtatttcttcacat

SEQ ID NO: 1173 - DNA, 21 bp, synthetic construct
  misc_feature 1..21: note = target HLA sequence complement
  source 1..21: mol_type = other DNA
acttcttccttccctattaaa

SEQ ID NO: 1174 - DNA, 21 bp, synthetic construct
  misc_feature 1..21: note = target HLA sequence complement
  source 1..21: mol_type = other DNA
gtgtctctcacagcttgtaaa

SEQ ID NO: 1175 - DNA, 21 bp, synthetic construct
  misc_feature 1..21: note = target HLA sequence complement
  source 1..21: mol_type = other DNA
ctgtgttcgtgtaggcataat

SEQ ID NO: 1176 - DNA, 21 bp, synthetic construct
  misc_feature 1..21: note = target HLA sequence complement
  source 1..21: mol_type = other DNA
tgtgttcgtgtaggcataatg

SEQ ID NO: 1177 - DNA, 21 bp, synthetic construct
  misc_feature 1..21: note = target HLA sequence complement
  source 1..21: mol_type = other DNA
taacttcttccttccctatta

SEQ ID NO: 1178 - DNA, 21 bp, synthetic construct
  misc_feature 1..21: note = target HLA sequence complement
  source 1..21: mol_type = other DNA
tctggacaggagcagagatac

SEQ ID NO: 1179 - DNA, 21 bp, synthetic construct
  misc_feature 1..21: note = target HLA sequence complement
  source 1..21: mol_type = other DNA
ttgctggcctggttctctttg

SEQ ID NO: 1180 - DNA, 21 bp, synthetic construct
  misc_feature 1..21: note = target HLA sequence complement
  source 1..21: mol_type = other DNA
tgtctctcacagcttgtaaag

SEQ ID NO: 1181 - DNA, 21 bp, synthetic construct
  misc_feature 1..21: note = target HLA sequence complement
  source 1..21: mol_type = other DNA
acttgaagaaccctgactttg

SEQ ID NO: 1182 - DNA, 21 bp, synthetic construct
  misc_feature 1..21: note = target HLA sequence complement
  source 1..21: mol_type = other DNA
gaagaaccctgactttgtttc

SEQ ID NO: 1183 - DNA, 21 bp, synthetic construct
  misc_feature 1..21: note = target HLA sequence complement
  source 1..21: mol_type = other DNA
tctgtgttcgtgtaggcataa

SEQ ID NO: 1184 - DNA, 21 bp, synthetic construct
  misc_feature 1..21: note = target HLA sequence complement
  source 1..21: mol_type = other DNA
catggtgcactgagctgtaac

SEQ ID NO: 1185 - DNA, 21 bp, synthetic construct
  misc_feature 1..21: note = target HLA sequence complement
  source 1..21: mol_type = other DNA
gtaacttcttccttccctatt

SEQ ID NO: 1186 - DNA, 21 bp, synthetic construct
  misc_feature 1..21: note = target HLA sequence complement
  source 1..21: mol_type = other DNA
catgtgcagcatgagggtttg

SEQ ID NO: 1187 - DNA, 21 bp, synthetic construct
  misc_feature 1..21: note = target HLA sequence complement
  source 1..21: mol_type = other DNA
ttgttcctgcccttccctttg

SEQ ID NO: 1188 - DNA, 21 bp, synthetic construct
  misc_feature 1..21: note = target HLA sequence complement
  source 1..21: mol_type = other DNA
acccagttctcactcccattg

SEQ ID NO: 1189 - DNA, 21 bp, synthetic construct
  misc_feature 1..21: note = target HLA sequence complement
  source 1..21: mol_type = other DNA
gggtttccagagaagccaatc

SEQ ID NO: 1190 - DNA, 21 bp, synthetic construct
  misc_feature 1..21: note = target HLA sequence complement
  source 1..21: mol_type = other DNA
ttctccctctcccaacctatg

SEQ ID NO: 1191 - DNA, 21 bp, synthetic construct
  misc_feature 1..21: note = target HLA sequence complement
  source 1..21: mol_type = other DNA
gtctctcacagcttgtaaagt

SEQ ID NO: 1192 - DNA, 21 bp, synthetic construct
  misc_feature 1..21: note = target HLA sequence complement
  source 1..21: mol_type = other DNA
tgtgtctctcacagcttgtaa

SEQ ID NO: 1193 - DNA, 21 bp, synthetic construct
  misc_feature 1..21: note = target HLA sequence complement
  source 1..21: mol_type = other DNA
gaggaagagctcagatagaaa

SEQ ID NO: 1194 - DNA, 21 bp, synthetic construct
  misc_feature 1..21: note = target HLA sequence complement
  source 1..21: mol_type = other DNA
tgaagaaccctgactttgttt

SEQ ID NO: 1195 - DNA, 21 bp, synthetic construct
  misc_feature 1..21: note = target HLA sequence complement
  source 1..21: mol_type = other DNA
ttgaagaaccctgactttgtt

SEQ ID NO: 1196 - DNA, 21 bp, synthetic construct
  misc_feature 1..21: note = target HLA sequence complement
  source 1..21: mol_type = other DNA
gtgttcgtgtaggcataatgt

SEQ ID NO: 1197 - DNA, 21 bp, synthetic construct
  misc_feature 1..21: note = target HLA sequence complement
  source 1..21: mol_type = other DNA
tggtgcactgagctgtaactt

SEQ ID NO: 1198 - DNA, 21 bp, synthetic construct
  misc_feature 1..21: note = target HLA sequence complement
  source 1..21: mol_type = other DNA
ctccctctcccaacctatgta

SEQ ID NO: 1199 - DNA, 21 bp, synthetic construct
  misc_feature 1..21: note = target HLA sequence complement
  source 1..21: mol_type = other DNA
aggaggaagagctcagataga

SEQ ID NO: 1200 - DNA, 21 bp, synthetic construct
  misc_feature 1..21: note = target HLA sequence complement
  source 1..21: mol_type = other DNA
acctatgtagggtccttcttc

SEQ ID NO: 1201 - DNA, 21 bp, synthetic construct
  misc_feature 1..21: note = target HLA sequence complement
  source 1..21: mol_type = other DNA
gggtccttcttcctggatact

SEQ ID NO: 1202 - DNA, 21 bp, synthetic construct
  misc_feature 1..21: note = target HLA sequence complement
  source 1..21: mol_type = other DNA
ggtccttcttcctggatactc

SEQ ID NO: 1203 - DNA, 21 bp, synthetic construct
  misc_feature 1..21: note = target HLA sequence complement
  source 1..21: mol_type = other DNA
gtccttcttcctggatactca

SEQ ID NO: 1204 - DNA, 21 bp, synthetic construct
  misc_feature 1..21: note = target HLA sequence complement
  source 1..21: mol_type = other DNA
aagccaatcagtgtcgtcgcg

SEQ ID NO: 1205 - DNA, 21 bp, synthetic construct
  misc_feature 1..21: note = target HLA sequence complement
  source 1..21: mol_type = other DNA
aagaggacctgcgctcttgga

SEQ ID NO: 1206 - DNA, 21 bp, synthetic construct
  misc_feature 1..21: note = target HLA sequence complement
  source 1..21: mol_type = other DNA
aagtgtgagacagctgccttg

SEQ ID NO: 1207 - DNA, 21 bp, synthetic construct
  misc_feature 1..21: note = target HLA sequence complement
  source 1..21: mol_type = other DNA
aaggcacctgcatgtgtctgt

SEQ ID NO: 1208 - DNA, 21 bp, synthetic construct
  misc_feature 1..21: note = target HLA sequence complement
  source 1..21: mol_type = other DNA
aatcatctttcctgttccaga

SEQ ID NO: 1209 - DNA, 21 bp, synthetic construct
  misc_feature 1..21: note = target HLA sequence complement
  source 1..21: mol_type = other DNA
aaaggcacctgcatgtgtctg

SEQ ID NO: 1210 - DNA, 21 bp, synthetic construct
  misc_feature 1..21: note = target HLA sequence complement
  source 1..21: mol_type = other DNA
aaagaggacctgcgctcttgg

SEQ ID NO: 1211 - DNA, 21 bp, synthetic construct
  misc_feature 1..21: note = target HLA sequence complement
  source 1..21: mol_type = other DNA
aaacgcatatgactcaccacg

SEQ ID NO: 1212 - DNA, 19 bp, synthetic construct
  misc_feature 1..19: note = target HLA sequence complement
  source 1..19: mol_type = other DNA
ggaagagctcagatagaaa

SEQ ID NO: 1213 - DNA, 19 bp, synthetic construct
  misc_feature 1..19: note = target HLA sequence complement
  source 1..19: mol_type = other DNA
gggagacacggaaagtgaa

SEQ ID NO: 1214 - DNA, 21 bp, synthetic construct
  misc_feature 1..21: note = target HLA sequence complement
  source 1..21: mol_type = other DNA
cacctgccatgtgcagcatga

SEQ ID NO: 1215 - DNA, 21 bp, synthetic construct
  misc_feature 1..21: note = target HLA sequence complement
  source 1..21: mol_type = other DNA
ggagatcacactgacctggca

SEQ ID NO: 1216 - DNA, 20 bp, synthetic construct
  misc_feature 1..20: note = target HLA sequence complement
  source 1..20: mol_type = other DNA
ggattacatcgccctgaaag

SEQ ID NO: 1217 - DNA, 20 bp, synthetic construct
  misc_feature 1..20: note = target HLA sequence complement
  source 1..20: mol_type = other DNA
gcaggagggtccggagtatt

SEQ ID NO: 1218 - DNA, 20 bp, synthetic construct
  misc_feature 1..20: note = target HLA sequence complement
  source 1..20: mol_type = other DNA
ggacggggagacacggaaag

SEQ ID NO: 1219 - DNA, 19 bp, synthetic construct
  misc_feature 1..19: note = target HLA sequence complement
  source 1..19: mol_type = other DNA
gaaagtgaaggcccactca

SEQ ID NO: 1220 - DNA, 20 bp, synthetic construct
  misc_feature 1..20: note = target HLA sequence complement
  source 1..20: mol_type = other DNA
gatacctggagaacgggaag

SEQ ID NO: 1221 - DNA, 20 bp, synthetic construct
  misc_feature 1..20: note = target HLA sequence complement
  source 1..20: mol_type = other DNA
gctgtggtggtgccttctgg

SEQ ID NO: 1222 - DNA, 20 bp, synthetic construct
  misc_feature 1..20: note = target HLA sequence complement
  source 1..20: mol_type = other DNA
gctactacaaccagagcgag

SEQ ID NO: 1223 - DNA, 19 bp, synthetic construct
  misc_feature 1..19: note = target HLA sequence complement
  source 1..19: mol_type = other DNA
gtggctccgcagatacctg

SEQ ID NO: 1224 - DNA, 19 bp, synthetic construct
  misc_feature 1..19: note = target HLA sequence complement
  source 1..19: mol_type = other DNA
gccaatcagtgtcgtcgcg

SEQ ID NO: 1225 - DNA, 19 bp, synthetic construct
  misc_feature 1..19: note = target HLA sequence complement
  source 1..19: mol_type = other DNA
gaggacctgcgctcttgga

SEQ ID NO: 1226 - DNA, 19 bp, synthetic construct
  misc_feature 1..19: note = target HLA sequence complement
  source 1..19: mol_type = other DNA
gtgtgagacagctgccttg

SEQ ID NO: 1227 - DNA, 19 bp, synthetic construct
  misc_feature 1..19: note = target HLA sequence complement
  source 1..19: mol_type = other DNA
ggcacctgcatgtgtctgt

SEQ ID NO: 1228 - DNA, 19 bp, synthetic construct
  misc_feature 1..19: note = target HLA sequence complement
  source 1..19: mol_type = other DNA
tcatctttcctgttccaga

SEQ ID NO: 1229 - DNA, 19 bp, synthetic construct
  misc_feature 1..19: note = target HLA sequence complement
  source 1..19: mol_type = other DNA
aggcacctgcatgtgtctg

SEQ ID NO: 1230 - DNA, 19 bp, synthetic construct
  misc_feature 1..19: note = target HLA sequence complement
  source 1..19: mol_type = other DNA
agaggacctgcgctcttgg

SEQ ID NO: 1231 - DNA, 19 bp, synthetic construct
  misc_feature 1..19: note = target HLA sequence complement
  source 1..19: mol_type = other DNA
acgcatatgactcaccacg

SEQ ID NO: 1232 - skipped

SEQ ID NO: 1233 - RNA, 23 nt, synthetic construct
  misc_feature 1..23: note = 5' Flank Sequence
  source 1..23: mol_type = other RNA
acaccatgttgccagtctctagg

SEQ ID NO: 1234 - RNA, 23 nt, synthetic construct
  misc_feature 1..23: note = 5' Flank Sequence
  source 1..23: mol_type = other RNA
tgatagcaatgtcagcagtgcct

SEQ ID NO: 1235 - RNA, 23 nt, synthetic construct
  misc_feature 1..23: note = 5' Flank Sequence
  source 1..23: mol_type = other RNA
tattgctgttgacagtgagcgac

SEQ ID NO: 1236 - RNA, 21 nt, synthetic construct
  misc_feature 1..21: note = 3' Flank Sequence
  source 1..21: mol_type = other RNA
tggcgtctggcccaaccacac

SEQ ID NO: 1237 - RNA, 21 nt, synthetic construct
  misc_feature 1..21: note = 3' Flank Sequence
  source 1..21: mol_type = other RNA
gtaaggttgaccatactctac

SEQ ID NO: 1238-1242 - skipped (5 entries)

SEQ ID NO: 1243 - RNA, 12 nt, synthetic construct
  misc_feature 1..12: note = Loop Region Sequence
  source 1..12: mol_type = other RNA
cttcctgtcaga

SEQ ID NO: 1244 - RNA, 15 nt, synthetic construct
  misc_feature 1..15: note = Loop Region Sequence
  source 1..15: mol_type = other RNA
cttccctttgtcaga

SEQ ID NO: 1245 - RNA, 12 nt, synthetic construct
  misc_feature 1..12: note = Loop Region Sequence
  source 1..12: mol_type = other RNA
gtgttattcttg

SEQ ID NO: 1246 - RNA, 12 nt, synthetic construct
  misc_feature 1..12: note = Loop Region Sequence
  source 1..12: mol_type = other RNA
gtgtcttaattg

SEQ ID NO: 1247 - RNA, 12 nt, synthetic construct
  misc_feature 1..12: note = Loop Region Sequence
  source 1..12: mol_type = other RNA
gtgttagtcttg

SEQ ID NO: 1248 - skipped

SEQ ID NO: 1249 - RNA, 12 nt, synthetic construct
  misc_feature 1..12: note = Loop Region Sequence
  source 1..12: mol_type = other RNA
ggacatccaggg

SEQ ID NO: 1250 - RNA, 15 nt, synthetic construct
  misc_feature 1..15: note = Loop Region Sequence
  source 1..15: mol_type = other RNA
gtgaagccacagatg

SEQ ID NO: 1251 - RNA, 10 nt, synthetic construct
  misc_feature 1..10: note = Loop Region Sequence
  source 1..10: mol_type = other RNA
gattctaaaa

SEQ ID NO: 1252 - DNA, 1443 bp, synthetic construct
  misc_feature 1..1443: note = PA2.1.14 (VL:VH) scFv LIR1 sHTICD
  source 1..1443: mol_type = other DNA
gacattcaaatgacccagagcccatccaccctgagcgcatctgtaggtgaccgggtcaccatcacttgtagatccagtcagagtattgtacacagtaatgggaacacctatttggaatggtatcagcagaaaccaggtaaagccccaaaattgctcatctacaaagtctctaacagatttagtggtgtaccagccaggttcagcggttccggaagtggtactgaattcaccctcacgatctcctctctccagccagatgatttcgccacttattactgttttcaaggttcacatgtgccgcgcacattcggtcagggtactaaagtagaagtcaaaggcggaggtggaagcggagggggaggatctggcggcggaggaagcggaggccaggtgcagctggtgcagtctggggctgaggtgaagaagcctgggtcctcagtgaaggtttcctgcaaggcttctggatacaccttcactagctatcatatacattgggtgcgccaggcccccggacaagggcttgagtggatcggatggatctaccctggcaatgttaacacagaatataatgagaagttcaagggcaaagccaccattaccgcggacgaatccacgaacacagcctacatggagctgagcagcctgagatctgaagacacggctgtgtattactgtgcgagggaggaaattacctacgctatggactactggggccagggaaccctggtcaccgtgtcctcagtggtctcaggaccgtctgggggccccagctccccgacaacaggccccacctccacatctggccctgaggaccagcccctcacccccaccgggtcggatccccagagtggtctgggaaggcacctgggggttgtgatcggcatcttggtggccgtcatcctactgctcctcctcctcctcctcctcttcctcatcctccgacatcgacgtcagggcaaacactggacatcgacccagagaaaggctgatttccaacatcctgcaggggctgtggggccagagcccacagacagaggcctgcagtggaggtccagcccagctgccgatgcccaggaagaaaacctctatgctgccgtgaagcacacacagcctgaggatggggtggagatggacactcggagcccacacgatgaagacccccaggcagtgacgtatgccgaggtgaaacactccagacctaggagagaaatggcctctcctccttccccactgtctggggaattcctggacacaaaggacagacaggcggaagaggacaggcagatggacactgaggctgctgcatctgaagccccccaggatgtgacctacgcccagctgcacagcttgaccctcagacgggaggcaactgagcctcctccatcccaggaagggccctctccagctgtgcccagcatctacgccactctggccatccactag

SEQ ID NO: 1253 - DNA, 1503 bp, synthetic construct
  misc_feature 1..1503: note = PA2.1.14 (VL:VH) scFv LIR1 HTICD
  source 1..1503: mol_type = other DNA
gacattcaaatgacccagagcccatccaccctgagcgcatctgtaggtgaccgggtcaccatcacttgtagatccagtcagagtattgtacacagtaatgggaacacctatttggaatggtatcagcagaaaccaggtaaagccccaaaattgctcatctacaaagtctctaacagatttagtggtgtaccagccaggttcagcggttccggaagtggtactgaattcaccctcacgatctcctctctccagccagatgatttcgccacttattactgttttcaaggttcacatgtgccgcgcacattcggtcagggtactaaagtagaagtcaaaggcggaggtggaagcggagggggaggatctggcggcggaggaagcggaggccaggtgcagctggtgcagtctggggctgaggtgaagaagcctgggtcctcagtgaaggtttcctgcaaggcttctggatacaccttcactagctatcatatacattgggtgcgccaggcccccggacaagggcttgagtggatcggatggatctaccctggcaatgttaacacagaatataatgagaagttcaagggcaaagccaccattaccgcggacgaatccacgaacacagcctacatggagctgagcagcctgagatctgaagacacggctgtgtattactgtgcgagggaggaaattacctacgctatggactactggggccagggaaccctggtcaccgtgtcctcatacggctcacagagctccaaaccctacctgctgactcaccccagtgaccccctggagctcgtggtctcaggaccgtctgggggccccagctccccgacaacaggccccacctccacatctggccctgaggaccagcccctcacccccaccgggtcggatccccagagtggtctgggaaggcacctgggggttgtgatcggcatcttggtggccgtcatcctactgctcctcctcctcctcctcctcttcctcatcctccgacatcgacgtcagggcaaacactggacatcgacccagagaaaggctgatttccaacatcctgcaggggctgtggggccagagcccacagacagaggcctgcagtggaggtccagcccagctgccgatgcccaggaagaaaacctctatgctgccgtgaagcacacacagcctgaggatggggtggagatggacactcggagcccacacgatgaagacccccaggcagtgacgtatgccgaggtgaaacactccagacctaggagagaaatggcctctcctccttccccactgtctggggaattcctggacacaaaggacagacaggcggaagaggacaggcagatggacactgaggctgctgcatctgaagccccccaggatgtgacctacgcccagctgcacagcttgaccctcagacgggaggcaactgagcctcctccatcccaggaagggccctctccagctgtgcccagcatctacgccactctggccatccactag

SEQ ID NO: 1254 - DNA, 1386 bp, synthetic construct
  misc_feature 1..1386: note = MSLN_SsI CD8_HT 41BB CD3z
  source 1..1386: mol_type = other DNA
caagtccagctccagcagtcgggcccagagttggagaagcctggggcgagcgtgaagatctcatgcaaagcctcaggctactcctttactggatacacgatgaattgggtgaaacagtcgcatggaaagtcactggaatggatcggtctgattacgccctacaacggcgcctccagctacaaccagaagttcaggggaaaggcgacccttactgtcgacaagtcgtcaagcaccgcctacatggacctcctgtccctgacctccgaagatagcgcggtctacttttgtgcacgcggaggttacgatggacggggattcgactactggggccagggaaccactgtcaccgtgtcgagcggaggcggagggagcggaggaggaggcagcggaggtggagggtcggatatcgaactcactcagtccccagcaatcatgtccgcttcaccgggagaaaaggtgaccatgacttgctcggcctcctcgtccgtgtcatacatgcactggtaccaacaaaaatcggggacctcccctaagagatggatctacgataccagcaaactggcttcaggcgtgccgggacgcttctcgggttcggggagcggaaattcgtattcgttgaccatttcgtccgtggaagccgaggacgacgcaacttattactgccaacagtggtcaggctacccgctcactttcggagccggcactaagctggagatcaccactaccccagcaccgaggccacccaccccggctcctaccatcgcctcccagcctctgtccctgcgtccggaggcatgtagacccgcagctggtggggccgtgcatacccggggtcttgacttcgcctgcgatatctacatttgggcccctctggctggtacttgcggggtcctgctgctttcactcgtgatcactctttactgtaagcgcggtcggaagaagctgctgtacatctttaagcaacccttcatgaggcctgtgcagactactcaagaggaggacggctgttcatgccggttcccagaggaggaggaaggcggctgcgaactgcgcgtgaaattcagccgcagcgcagatgctccagcctacaagcaggggcagaaccagctctacaacgaactcaatcttggtcggagagaggagtacgacgtgctggacaagcggagaggacgggacccagaaatgggcgggaagccgcgcagaaagaatccccaagagggcctgtacaacgagctccaaaaggataagatggcagaagcctatagcgagattggtatgaaaggggaacgcagaagaggcaaaggccacgacggactgtaccagggactcagcaccgccaccaaggacacctatgacgctcttcacatgcaggccctgccgcctcgg

SEQ ID NO: 1255 - DNA, 1443 bp, synthetic construct
  misc_feature 1..1443: note = PA2.1.14 scFv LIR1 sHTICD
  source 1..1443: mol_type = other DNA
caggtgcagctggtgcagtctggggctgaggtgaagaagcctgggtcctcagtgaaggtttcctgcaaggcttctggatacaccttcactagctatcatatacattgggtgcgccaggcccccggacaagggcttgagtggatcggatggatctaccctggcaatgttaacacagaatataatgagaagttcaagggcaaagccaccattaccgcggacgaatccacgaacacagcctacatggagctgagcagcctgagatctgaagacacggctgtgtattactgtgcgagggaggaaattacctacgctatggactactggggccagggaaccctggtcaccgtgtcctcaggcggaggtggaagcggagggggaggatctggcggcggaggaagcggaggcgacattcaaatgacccagagcccatccaccctgagcgcatctgtaggtgaccgggtcaccatcacttgtagatccagtcagagtattgtacacagtaatgggaacacctatttggaatggtatcagcagaaaccaggtaaagccccaaaattgctcatctacaaagtctctaacagatttagtggtgtaccagccaggttcagcggttccggaagtggtactgaattcaccctcacgatctcctctctccagccagatgatttcgccacttattactgttttcaaggttcacatgtgccgcgcacattcggtcagggtactaaagtagaagtcaaagtggtctcaggaccgtctgggggccccagctccccgacaacaggccccacctccacatctggccctgaggaccagcccctcacccccaccgggtcggatccccagagtggtctgggaaggcacctgggggttgtgatcggcatcttggtggccgtcatcctactgctcctcctcctcctcctcctcttcctcatcctccgacatcgacgtcagggcaaacactggacatcgacccagagaaaggctgatttccaacatcctgcaggggctgtggggccagagcccacagacagaggcctgcagtggaggtccagcccagctgccgatgcccaggaagaaaacctctatgctgccgtgaagcacacacagcctgaggatggggtggagatggacactcggagcccacacgatgaagacccccaggcagtgacgtatgccgaggtgaaacactccagacctaggagagaaatggcctctcctccttccccactgtctggggaattcctggacacaaaggacagacaggcggaagaggacaggcagatggacactgaggctgctgcatctgaagccccccaggatgtgacctacgcccagctgcacagcttgaccctcagacgggaggcaactgagcctcctccatcccaggaagggccctctccagctgtgcccagcatctacgccactctggccatccactag
